(19) United States
(12) Patent Application Publication
(10) Pub. No.: US 2006/0228715 A1
(43) Pub. Date: Oct. 12, 2006

(54) Genetic polymorphisms associated with coronary heart disease, methods of detection and uses thereof

(75) Inventors: Dov Shiffman, Palo Alto, CA (US); Michele Cargill, San Francisco, CA (US); James J. Devlin, Lafayette, CA (US)

Correspondence Address: CELERA GENOMICS;ATTN: WAYNE MONTGOMERY, VICE PRES, INTEL PROPERTY, 45 WEST GUDE DRIVE, C2-4#20, ROCKVILLE, MD, 20850, US

(73) Assignee: APPLERA CORPORATION, Norwalk, CT (US)

(21) Appl. No.: 11/073,360

(22) Filed: Mar. 7, 2005

Related U.S. Application Data
(60) Provisional application No. 60/550,051, filed on Mar. 5, 2004.
(60) Provisional application No. 60/567,831, filed on May 5, 2004.
(60) Provisional application No. 60/617,163, filed on Oct. 12, 2004.

(51) Int. Cl. C12Q 1/68; C07H 21/04; C12P 21/06; C12N 5/06; C07K 14/705; C07K 16/28; A61K 31/401; A61K 31/22; A61K 31/366

(52) U.S. Cl. 435/6; 435/69.1; 435/320.1; 435/325; 530/350; 536/23.5; 530/388.22; 514/423; 514/450; 514/548

(57) ABSTRACT

The present invention is based on the discovery of genetic polymorphisms that are associated with coronary heart disease, and in particular MI, and response to drug treatment. In particular, the present invention relates to nucleic acid molecules containing the polymorphisms, variant proteins encoded by such nucleic acid molecules, reagents for detecting the polymorphic nucleic acid molecules and proteins, and methods of using the nucleic acid and proteins as well as methods of using reagents for their detection.

### FIELD OF THE INVENTION

[0001] The present invention is in the field of coronary heart disease (CHD) and, in particular, myocardial infarction (MI) diagnosis and therapy. In particular, the present invention relates to specific single nucleotide polymorphisms (SNPs) in the human genome, and their association with MI and related pathologies. Based on differences in allele frequencies in the patient population relative to normal individuals, the naturally-occurring SNPs disclosed herein can be used as targets for the design of diagnostic reagents and the development of therapeutic agents, as well as for disease association and linkage analysis. In particular, the SNPs of the present invention are useful for identifying an individual who is at an increased or decreased risk of developing CHD and in particular MI, and for early detection of the disease, for providing clinically important information for the prevention and/or treatment of MI, for screening and selecting therapeutic agents and for predicting a patient's response to therapeutic agents. The SNPs disclosed herein are also useful for human identification applications. Methods, assays, kits, and reagents for detecting the presence of these polymorphisms and their encoded products are provided.

### BACKGROUND OF THE INVENTION

[0002] CHD is defined in the Framingham study as encompassing angina, MI, coronary insufficiency (which is manifested as ischemia, that is, impaired oxygen flow to the heart muscle), and coronary heart disease death (Wilson et al., Circulation 97:1837-1847 (1998)). It is sometimes recorded through clinical records that indicate the following interventions: coronary artery bypass graft, angioplasty and stent placement in addition to clinical records of MI, angina, or coronary death. This latter definition is used in many population based studies and clinical trials, but it probably misses silent MI events and some unreported angina.

[0003] MI (or heart attack) is the most common cause of mortality in developed countries. The incidence of MI is still high despite currently available preventive measures and therapeutic intervention. More than 1,500,000 people in the US suffer acute MI each year (many without seeking help due to unrecognized MI), and one third of these people die. The lifetime risk of coronary artery disease events at age 40 years is 42.4% for men (one in two) and 24.9% for women (one in four) (Lloyd-Jones D M; Lancet, 1999 353: 89-92).

[0004] MI is a multifactorial disease that involves atherogenesis, thrombus formation and propagation. Thrombosis can result in complete or partial occlusion of coronary arteries. The luminal narrowing or blockage of coronary arteries reduces oxygen and nutrient supply to the cardiac muscle (cardiac ischemia), leading to myocardial necrosis and/or stunning. MI, unstable angina, and sudden ischemic death are clinical manifestations of cardiac muscle damage. All three endpoints are part of the Acute Coronary Syndrome since the underlying mechanisms of acute complications of atherosclerosis are considered to be the same.

[0005] Atherogenesis, the first step of pathogenesis of MI, is a complex interaction between blood elements, mechanical forces, disturbed blood flow, and vessel wall abnormality that results in plaque accumulation. An unstable (vulnerable) plaque was recognized as an underlying cause of arterial thrombotic events and MI. A vulnerable plaque is a plaque, often not stenotic, that has a high likelihood of becoming disrupted or eroded, thus forming a thrombogenic focus. MI due to a vulnerable plaque is a complex phenomenon that includes: plaque vulnerability, blood vulnerability (hypercoagulation, hypothrombolysis), and heart vulnerability (sensitivity of the heart to ischemia or propensity for arrhythmia). Recurrent myocardial infarction (RMI) can generally be viewed as a severe form of MI progression caused by multiple vulnerable plaques that are able to undergo pre-rupture or a pre-erosive state, coupled with extreme blood coagulability.

[0006] The current diagnosis of MI is based on the levels of troponin I or T that indicate the cardiac muscle progressive necrosis, impaired electrocardiogram (ECG), and detection of abnormal ventricular wall motion or angiographic data (the presence of acute thrombi). However, due to the asymptomatic nature of 25% of acute MIs (absence of atypical chest pain, low ECG sensitivity), a significant portion of MIs are not diagnosed and therefore not treated appropriately (e.g., prevention of recurrent MIs).

[0007] MI risk assessment and prognosis is currently done using classic risk factors or the recently introduced Framingham Risk Index. Both of these assessments put a significant weight on LDL levels to justify preventive treatment. However, it is well established that half of all MIs occur in individuals without overt hyperlipidemia.

[0008] Other emerging risk factors of MI are inflammatory biomarkers such as C-reactive protein (CRP), ICAM-1, SAA, TNF α, homocysteine, impaired fasting glucose, new lipid markers (ox LDL, Lp-a, MAD-LDL, etc.) and pro-thrombotic factors (fibrinogen, PAI-1). These markers have significant limitations such as low specificity and low positive predictive value, and the need for multiple reference intervals to be used for different groups of people (e.g., males-females, smokers-non smokers,.hormone replacement therapy users, different age groups). These limitations diminish the utility of such markers as independent prognostic markers for MI screening.

[0009] Genetics plays an important role in MI risk. Families with a positive family history of MI account for 14% of the general population, 72% of premature MIs, and 48% of all MIs (Williams R R, Am J Cardiology, 2001; 87:129). In addition, replicated linkage studies have revealed evidence of multiple regions of the genome that are associated with MI and relevant to MI genetic traits, including regions on chromosomes 14, 2, 3 and 7 (Broeckel U, Nature Genetics, 2002; 30: 210; Harrap S, Arterioscler Thromb Vasc Biol, 2002; 22: 874-878, Shearman A, Human Molecular Genetics, 2000, 20 9; 9,1315-1320), implying that genetic risk factors influence the onset, manifestation, and progression of MI. Recent association studies have identified allelic variants that are associated with acute complications of CHD, including allelic variants of the ApoE, ApoA5, Lpa, APOCIII, and Klotho genes.

[0010] Genetic markers such as SNPs single nucleotide polymorphisms are preferable to other types of biomarkers. Genetic markers that are prognostic for MI can be genotyped early in life and could predict individual response to various risk factors. The combination of serum protein levels and genetic predisposition revealed by genetic analysis of susceptibility genes can provide an integrated assessment of the interaction between genotypes and environmental factors, resulting in synergistically increased prognostic value of diagnostic tests.

[0011] Thus, there is an urgent need for novel genetic markers that are predictive of predisposition to CHD such as MI, particularly for individuals who are unrecognized as having a predisposition to MI. Such genetic markers may enable prognosis of MI in much larger populations compared with the populations that can currently be evaluated by using existing risk factors and biomarkers. The availability of a genetic test may allow, for example, appropriate preventive treatments for acute coronary events to be provided for susceptible individuals (such preventive treatments may include, for example, statin treatments and statin dose escalation, as well as changes to modifiable risk factors), lowering of the thresholds for ECG and angiography testing, and allow adequate monitoring of informative biomarkers. Moreover, the discovery of genetic markers associated with MI will provide novel targets for therapeutic intervention or preventive treatments of MI, and enable the development of new therapeutic agents for treating MI and other cardiovascular disorders.

[0012] Coronary stenosis is the narrowing of coronary arteries by obstructive atherosclerotic plaques. The coronary arteries supply oxygenated blood flow to the myocardium. Although mild and moderate coronary stenosis do not impede resting coronary flow, stenosis>30-45% starts to restrict maximal coronary flow. Severe coronary stenosis (>70% reduction in luminal diameter) causes stable angina (ischemic chest pain upon exertion). Significant stenosis contributes, along with plaque rupture and thrombus formation, coronary spasm, or inflammation/infection, to unstable angina as well as myocardial infarction. Together with arrhythmia, coronary stenosis is a major factor of sudden cardiac deaths, as evidenced by its presence in two or more major coronary arteries in 90% of adult sudden cardiac death victims.

[0013] Coronary stenosis is a prevalent disease. Each year in the United States, 440,000 new cases of stable angina and 150,000 new cases of unstable angina occur. This year, an estimated 1.1 million Americans will have a new or recurrent heart attack. These incidences result in over six million individuals in the U.S. living with stable or unstable angina pectoris, a debilitating condition, and over seven million individuals in the U.S. living with a history of myocardial infarction. Coronary stenosis is frequently a deadly disease. It is a major underlying cause of CHD, which is the single largest cause of death in the U.S. Over half a million coronary deaths, including 250,000 sudden cardiac deaths, occur each year in U.S.

[0014] Reduction of coronary and cerebrovascular events and total mortality by treatment with HMG-CoA reductase inhibitors (statins) has been demonstrated in a number of randomized, double blinded, placebo controlled prospective trials (Waters, D. D., Clin Cardiol, 2001. 24(8 Suppl): p. III3-7, Singh, B. K. and J. L. Mehta, Curr. Opin. Cardiol, 2002. 17(5): p. 503-11). These drugs have their primary effect through the inhibition of hepatic cholesterol synthesis, thereby upregulating LDL receptor in the liver. The resultant increase in LDL catabolism results in decreased circulating LDL, a major risk factor for cardiovascular disease.

[0015] Statins can be divided into two types according to their physicochemical and pharmacokinetic properties. Statins such as lovastatin, simvastatin, atorvastatin, and cerevastatin are hydrophobic in nature and, as such, diffuse across membranes and thus are highly cell permeable. Hydrophilic statins such as pravastatin are more polar, such that they require specific cell surface transporters for cellular uptake (Ziegler, K. and W. Stunkel, Biochim Biophys Acta, 1992.1139(3): p.203-9, Yamazaki, M., et al., Am J Physiol, 1993, 264(1 Pt 1): p. G36-44, Komai, T., et al., Biochem Pharmacol, 1992. 43(4): p. 667-70). The latter statin utilizes a transporter, OATP2, whose tissue distribution is confined to the liver and, therefore, they are relatively hepato-specific inhibitors (Hsiang, B., et al., J Biol Chem, 1999. 274(52): p. 37161-8). The former statins, not requiring specific transport mechanisms, are available to all cells and they can directly impact a much broader spectrum of cells and tissues. These differences in properties may influence the spectrum of activities that each statin possesses. Pravastatin, for instance, has a low myopathic potential in animal models and myocyte cultures compared to other hydrophobic statins (Masters, B. A., et al., Toxicol Appl Pharmacol, 1995. 131(1): p. 163-74. Nakahara, K., et al., Toxicol Appl Pharmacol, 1998. 152(1): p. 99-106, Reijneveld, J. C., et al., Pediatr Res, 1996. 39(6): p. 1028-35).

[0016] Evidence from gene association studies is accumulating to indicate that responses to drugs are, indeed, at least partly under genetic control. As such, pharmacogenetics—the study of variability in drug responses attributed to hereditary factors in different populations—may significantly assist in providing answers toward meeting this challenge (Roses, A. D., Nature, 2000. 405(6788): p. 857-65, Mooser, V., et al., J Thromb Haemost, 2003. 1(7): p. 1398-1402, Humma, L. M. and S. G. Terra, Am. J. Health Syst Pharm, 2002. 59(13): p. 1241-52). Numerous associations have been reported between selected genotypes, as defined by SNPs and other sequence variations and specific responses to cardiovascular drugs. Polymorphisms in several genes have been suggested to influence responses to statins including CETP (Kuivenhoven, J. A., et al., N Engl J Med, 1998. 338(2): p. 86-93), beta-fibrinogen (de Maat, M. P., et al., Arterioscler Thromb Vasc Biol, 1998. 18(2): p. 265-71), hepatic lipase (Zambon, A., et al., Circulation, 2001. 103(6): p. 792-8, lipoprotein lipase (Jukema, J. W., et al., Circulation, 1996. 94(8): p. 1913-8), glycoprotein IIIa (Bray, P. F., et al., Am J Cardiol, 2001. 88(4): p. 347-52), stromelysin-1 (de Maat, M. P., et al., Am J Cardiol, 1999. 83(6): p. 852-6), and apolipoprotein E (Gerdes, L. U., et al., Circulation, 2000. 101(12): p. 1366-71, Pedro-Botet, J., et al., Atherosclerosis, 2001. 158(1): p. 183-93). Some of these variants were shown to effect clinical events while others were associated with changes in surrogate endpoints. Thus there is the need for markers and individuals responsiveness to statins.

[0017] SNPs

[0018] The genomes of all organisms undergo spontaneous mutation in the course of their continuing evolution, generating variant forms of progenitor genetic sequences (Gusella, Ann. Rev. Biochem. 55, 831-854 (1986)). A variant form may confer an evolutionary advantage or disadvantage relative to a progenitor form or may be neutral. In some instances, a variant form confers an evolutionary advantage to the species and is eventually incorporated into the DNA of many or most members of the species and effectively becomes the progenitor form. Additionally, the effects of a variant form may be both beneficial and detrimental, depending on the circumstances. For example, a heterozygous sickle cell mutation confers resistance to malaria, but a homozygous sickle cell mutation is usually lethal. In many cases, both progenitor and variant forms survive and co-exist in a species population. The coexistence of multiple forms of a genetic sequence gives rise to genetic polymorphisms, including SNPs.

[0019] Approximately 90% of all polymorphisms in the human genome are SNPS. SNPs are single base positions in DNA at which different alleles, or alternative nucleotides, exist in a population. The SNP position (interchangeably referred to herein as SNP, SNP site, SNP locus, SNP marker, or marker) is usually preceded by and followed by highly conserved sequences of the allele (e.g., sequences that vary in less than 1/100 or 1/1000 members of the populations). An individual may be homozygous or heterozygous for an allele at each SNP position. A SNP can, in some instances, be referred to as a “cSNP” to denote that the nucleotide sequence containing the SNP is an amino acid coding sequence.

[0020] A SNP may arise from a substitution of one nucleotide for another at the polymorphic site. Substitutions can be transitions or transversions. A transition is the replacement of one purine nucleotide by another purine nucleotide, or one pyrimidine by another pyrimidine. A transversion is the replacement of a purine by a pyrimidine, or vice versa. A SNP may also be a single base insertion or deletion variant referred to as an “indel” (Weber et al., “Human diallelic insertion/deletion polymorphisms”, Am J Hum Genet October 2002; 71(4):854-62).

[0021] A synonymous codon change, or silent mutation/SNP (terms such as “SNP”, “polymorphism”, “mutation”, “mutant”, “variation”, and “variant” are used herein interchangeably), is one that does not result in a change of amino acid due to the degeneracy of the genetic code. A substitution that changes a codon coding for one amino acid to a codon coding for a different amino acid (i.e., a non-synonymous codon change) is referred to as a missense mutation. A nonsense mutation results in a type of non-synonymous codon change in which a stop codon is formed, thereby leading to premature termination of a polypeptide chain and a truncated protein. A read-through mutation is another type of non-synonymous codon change that causes the destruction of a stop codon, thereby resulting in an extended polypeptide product. While SNPs can be bi-, tri-, or tetra-allelic, the vast majority of the SNPs are bi-allelic, and are thus often referred to as “bi-allelic markers”, or “di-allelic markers”.

[0022] As used herein, references to SNPs and SNP genotypes include individual SNPs and/or haplotypes, which are groups of SNPs that are generally inherited together. Haplotypes can have stronger correlations with diseases or other phenotypic effects compared with individual SNPs, and therefore may provide increased diagnostic accuracy in some cases (Stephens et al. Science 293, 489-493, 20 Jul. 2001).

[0023] Causative SNPs are those SNPs that produce alterations in gene expression or in the expression, structure, and/or function of a gene product, and therefore are most predictive of a possible clinical phenotype. One such class includes SNPs falling within regions of genes encoding a polypeptide product, i.e. cSNPs. These SNPs may result in an alteration of the amino acid sequence of the polypeptide product (i.e., non-synonymous codon changes) and give rise to the expression of a defective or other variant protein. Furthermore, in the case of nonsense mutations, a SNP may lead to premature termination of a polypeptide product. Such variant products can result in a pathological condition, e.g., genetic disease. Examples of genes in which a SNP within a coding sequence causes a genetic disease include sickle cell anemia and cystic fibrosis.

[0024] Causative SNPs do not necessarily have to occur in coding regions; causative SNPs can occur in, for example, any genetic region that can ultimately affect the expression, structure, and/or activity of the protein encoded by a nucleic acid. Such genetic regions include, for example, those involved in transcription, such as SNPs in transcription factor binding domains, SNPs in promoter regions, in areas involved in transcript processing, such as SNPs at intron-exon boundaries that may cause defective splicing, or SNPs in mRNA processing signal sequences such as polyadenylation signal regions. Some SNPs that are not causative SNPs nevertheless are in close association with, and therefore segregate with, a disease-causing sequence. In this situation, the presence of a SNP correlates with the presence of, or predisposition to, or an increased risk in developing the disease. These SNPs, although not causative, are nonetheless also useful for diagnostics, disease predisposition screening, and other uses.

[0025] An association study of a SNP and a specific disorder involves determining the presence or frequency of the SNP allele in biological samples from individuals with the disorder of interest, such as MI, and comparing the information to that of controls (i.e., individuals who do not have the disorder; controls may be also referred to as “healthy” or “normal” individuals) who are preferably of similar age and race. The appropriate selection of patients and controls is important to the success of SNP association studies. Therefore, a pool of individuals with well-characterized phenotypes is extremely desirable.

[0026] A SNP may be screened in diseased tissue samples or any biological sample obtained from a diseased individual, and compared to control samples, and selected for its increased (or decreased) occurrence in a specific pathological condition, such as pathologies related to CHD and in particular, MI. Once a statistically significant association is established between one or more SNP(s) and a pathological condition (or other phenotype) of interest, then the region around the SNP can optionally be thoroughly screened to identify the causative genetic locus/sequence(s) (e.g., causative SNP/mutation, gene, regulatory region, etc.) that influences the pathological condition or phenotype. Association studies may be conducted within the general population and are not limited to studies performed on related individuals in affected families (linkage studies).

[0027] Clinical trials have shown that patient response to treatment with pharmaceuticals is often heterogeneous. There is a continuing need to improve pharmaceutical agent design and therapy. In that regard, SNPs can be used to identify patients most suited to therapy with particular pharmaceutical agents (this is often termed “pharmacogenomics”). Similarly, SNPs can be used to exclude patients from certain treatment due to the patient's increased likelihood of developing toxic side effects or their likelihood of not responding to the treatment. Pharmacogenomics can also be used in pharmaceutical research to assist the drug development and selection process. (Linder et al. (1997), Clinical Chemistry, 43, 254; Marshall (1997), Nature Biotechnology, 15, 1249; International Patent Application WO 97/40462, Spectra Biomedical; and Schafer et al. (1998), Nature Biotechnology, 16:3).

### SUMMARY OF THE INVENTION

[0028] The present invention relates to the identification of novel SNPs, unique combinations of such SNPs, and haplotypes of SNPs that are associated with CHD and, in particular, MI. The polymorphisms disclosed herein are directly useful as targets for the design of diagnostic reagents and the development of therapeutic agents for use in the diagnosis and treatment of CHD, in particular MI, as well as for predicting a patient's response to therapeutic agents such as statins.

[0029] Based on the identification of SNPs associated with MI, the present invention also provides methods of detecting these variants as well as the design and preparation of detection reagents needed to accomplish this task. The invention specifically provides, for example, novel SNPs in genetic sequences involved in MI, isolated nucleic acid molecules (including, for example, DNA and RNA molecules) containing these SNPs, variant proteins encoded by nucleic acid molecules containing such SNPs, antibodies to the encoded variant proteins, computer-based and data storage systems containing the novel SNP information, methods of detecting these SNPs in a test sample, methods of identifying individuals who have an altered (i.e., increased or decreased) risk of developing MI based on the presence or absence of one or more particular nucleotides (alleles) at one or more SNP sites disclosed herein or the detection of one or more encoded variant products (e.g., variant mRNA transcripts or variant proteins), methods of identifying individuals who are more or less likely to respond to a treatment (or more or less likely to experience undesirable side effects from a treatment, etc.), methods of screening for compounds useful in the treatment of a disorder associated with a variant gene/protein, compounds identified by these methods, methods of treating disorders mediated by a variant gene/protein, methods of using the novel SNPs of the present invention for human identification, etc.

[0030] In Tables 1-2, the present invention provides gene information, transcript sequences (SEQ ID NOS:1-126), encoded amino acid sequences (SEQ ID NOS:127-252), genomic sequences (SEQ ID NOS:1585-1662), transcript-based context sequences (SEQ ID NOS:253-1584) and genomic-based context sequences (SEQ ID NOS:1663-17,275) that contain the SNPs of the present invention, and extensive SNP information that includes observed alleles, allele frequencies, populations/ethnic groups in which alleles have been observed, information about the type of SNP and corresponding functional effect, and, for cSNPs, information about the encoded polypeptide product. The transcript sequences (SEQ ID NOS:1-126), amino acid sequences (SEQ ID NOS:127-252), genomic sequences (SEQ ID NOS:1585-1662), transcript-based SNP context sequences (SEQ ID NOS: 253-1584), and genomic-based SNP context sequences (SEQ ID NOS:1663-17,275) are also provided in the Sequence Listing.

[0031] In a specific embodiment of the present invention, SNPs that occur naturally in the human genome are provided as isolated nucleic acid molecules. These SNPs are associated with CHD, and in particular MI such that they can have a variety of uses in the diagnosis and/or treatment of MI and related pathologies. One aspect of the present invention relates to an isolated nucleic acid molecule comprising a nucleotide sequence in which at least one nucleotide is a SNP disclosed in Tables 3 and/or 4. In an alternative embodiment, a nucleic acid of the invention is an amplified polynucleotide, which is produced by amplification of a SNP-containing nucleic acid template. In another embodiment, the invention provides for a variant protein that is encoded by a nucleic acid molecule containing a SNP disclosed herein.

[0032] In yet another embodiment of the invention, a reagent for detecting a SNP in the context of its naturally-occurring flanking nucleotide sequences (which can be, e.g., either DNA or mRNA) is provided. In particular, such a reagent may be in the form of, for example, a hybridization probe or an amplification primer that is useful in the specific detection of a SNP of interest. In an alternative embodiment, a protein detection reagent is used to detect a variant protein that is encoded by a nucleic acid molecule containing a SNP disclosed herein. A preferred embodiment of a protein detection reagent is an antibody or an antigen-reactive antibody fragment.

[0033] Various embodiments of the invention also provide kits comprising SNP detection reagents, and methods for detecting the SNPs disclosed herein by employing detection reagents. In a specific embodiment, the present invention provides for a method of identifying an individual having an increased or decreased risk of developing MI by detecting the presence or absence of one or more SNP alleles disclosed herein. In another embodiment, a method for diagnosis of MI by detecting the presence or absence of one or more SNP alleles disclosed herein is provided.

[0034] The nucleic acid molecules of the invention can be inserted in an expression vector, such as to produce a variant protein in a host cell. Thus, the present invention also provides for a vector comprising a SNP-containing nucleic acid molecule, genetically-engineered host cells containing the vector, and methods for expressing a recombinant variant protein using such host cells. In another specific embodiment, the host cells, SNP-containing nucleic acid molecules, and/or variant proteins can be used as targets in a method for screening and identifying therapeutic agents or pharmaceutical compounds useful in the treatment of CHD, and in particular MI.

[0035] An aspect of this invention is a method for treating CHD, and in particular MI, in a human subject wherein said human subject harbors a SNP, gene, transcript, and/or encoded protein identified in Tables 1-2, which method comprises administering to said human subject a therapeutically or prophylactically effective amount of one or more agents counteracting the effects of the disease, such as by inhibiting (or stimulating) the activity of the gene, transcript, and/or encoded protein identified in Tables 1-2.

[0036] Another aspect of this invention is a method for identifying an agent useful in therapeutically or prophylactically treating CHD, and in particular MI, in a human subject wherein said human subject harbors a SNP, gene, transcript, and/or encoded protein identified in Tables 1-2, which method comprises contacting the gene, transcript, or encoded protein with a candidate agent under conditions suitable to allow formation of a binding complex between the gene, transcript, or encoded protein and the candidate agent and detecting the formation of the binding complex, wherein the presence of the complex identifies said agent.

[0037] Another aspect of this invention is a method for treating MI in a human subject, which method comprises:

[0038] (i) determining that said human subject harbors a SNP, gene, transcript, and/or encoded protein identified in Tables 1-2, and

[0039] (ii) administering to said subject a therapeutically or prophylactically effective amount of one or more agents counteracting the effects of the disease such as statins.

[0040] Many other uses and advantages of the present invention will be apparent to those skilled in the art upon review of the detailed description of the preferred embodiments herein. Solely for clarity of discussion, the invention is described in the sections below by way of non-limiting examples.

[0041] Description of the Files Contained on the CD-R Named CL001586CDR

[0042] The CD-R named CL001586CDR contains the following five text (ASCII) files:

[0043] 1) File SEQLIST_{—}1586.txt provides the Sequence Listing. The Sequence Listing provides the transcript sequences (SEQ ID NOS:1-126) and protein sequences (SEQ ID NOS:127-252) as shown in Table 1, and genomic sequences (SEQ ID NOS:1585-1662) as shown in Table 2, for each MI-associated gene that contains one or more SNPs of the present invention. Also provided in the Sequence Listing are context sequences flanking each SNP, including both transcript-based context sequences as shown in Table 1 (SEQ ID NOS:253-1584) and genomic-based context sequences as shown in Table 2 (SEQ ID NOS: 1663-17,275). The context sequences generally provide 100 bp upstream (5′) and 100 bp downstream (3′) of each SNP, with the SNP in the middle of the context sequence, for a total of 200bp of context sequence surrounding each SNP. File SEQLIST_{—}1586.txt is 12,183 KB in size, and was created on Mar. 7, 2005.

[0044] 2) File TABLE1_{—}1586.txt provides Table 1. File TABLE1_{—}1586.txt is 1,236 KB in size, and was created on Mar. 7, 2005.

[0045] 3) File TABLE2_{—}1586.txt provides Table 2. File TABLE2_{—}1586.txt is 12,083 KB in size, and was created on Mar. 7, 2005.

[0046] 4) File TABLE3_{—}1586.txt provides Table 3. File TABLE3_{—}1586.txt is 9 KB in size, and was created on Mar. 7, 2005.

[0047] 5) File TABLE4_{—}1586.txt provides Table 4. File TABLE4_{—}1586.txt is 18 KB in size, and was created on Mar. 7, 2005.

[0048] The material contained on the CD-R labeled CL001586CDR is hereby incorporated by reference pursuant to 37 CFR 1.77(b)(4).

[0049] Description of Table 1 and Table 2

[0050] Table 1 and Table 2 (both provided on the CD-R) disclose the SNP and associated gene/transcript/protein information of the present invention. For each gene, Table 1 and Table 2 each provide a header containing gene/transcript/protein information, followed by a transcript and protein sequence (in Table 1) or genomic sequence (in Table 2), and then SNP information regarding each SNP found in that gene/transcript.

[0051] NOTE: SNPs may be included in both Table 1 and Table 2; Table 1 presents the SNPs relative to their transcript sequences and encoded protein sequences, whereas Table 2 presents the SNPs relative to their genomic sequences (in some instances Table 2 may also include, after the last gene sequence, genomic sequences of one or more intergenic regions, as well as SNP context sequences and other SNP information for any SNPs that lie within these intergenic regions). SNPs can readily be cross-referenced between Tables based on their hCV (or, in some instances, hDV) identification numbers.

[0052] The gene/transcript/protein information includes:

[0053] a gene number (1 through n, where n=the total number of genes in the Table)

[0054] a Celera hCG and UID internal identification numbers for the gene

[0055] a Celera hCT and UID internal identification numbers for the transcript (Table 1 only)

[0056] a public Genbank accession number (e.g., RefSeq NM number) for the transcript (Table 1 only)

[0057] a Celera hCP and UID internal identification numbers for the protein encoded by the hCT transcript (Table 1 only)

[0058] a public Genbank accession number (e.g., RefSeq NP number) for the protein (Table 1 only)

[0059] an art-known gene symbol

[0060] an art-known gene/protein name

[0061] Celera genomic axis position (indicating start nucleotide position-stop nucleotide position)

[0062] the chromosome number of the chromosome on which the gene is located

[0063] an OMIM (Online Mendelian Inheritance in Man; Johns Hopkins University/NCBI) public reference number for obtaining further information regarding the medical significance of each gene

[0064] alternative gene/protein name(s) and/or symbol(s) in the OMIM entry

[0065] NOTE: Due to the presence of alternative splice forms, multiple transcript/protein entries can be provided for a single gene entry in Table 1; i.e., for a single Gene Number, multiple entries may be provided in series that differ in their transcript/protein information and sequences.

[0066] Following the gene/transcript/protein information is a transcript sequence and protein sequence (in Table 1), or a genomic sequence (in Table 2), for each gene, as follows:

[0067] transcript sequence (Table 1 only) (corresponding to SEQ ID NOS:1-126 of the Sequence Listing), with SNPs identified by their IUB codes (transcript sequences can include 5′ UTR, protein coding, and 3′ UTR regions). (NOTE: If there are differences between the nucleotide sequence of the hCT transcript and the corresponding public transcript sequence identified by the Genbank accession number, the hCT transcript sequence (and encoded protein) is provided, unless the public sequence is a RefSeq transcript sequence identified by an NM number, in which case the RefSeq NM transcript sequence (and encoded protein) is provided. However, whether the hCT transcript or RefSeq NM transcript is used as the transcript sequence, the disclosed SNPs are represented by their IUB codes within the transcript.)

[0068] the encoded protein sequence (Table 1 only) (corresponding to SEQ ID NOS:127-252 of the Sequence Listing)

[0069] the genomic sequence of the gene (Table 2 only), including 6 kb on each side of the gene boundaries (i.e., 6 kb on the 5′ side of the gene plus 6 kb on the 3′ side of the gene) (corresponding to SEQ ID NOS:1585-1662 of the Sequence Listing).

[0070] After the last gene sequence, Table 2 may include additional genomic sequences of intergenic regions (in such instances, these sequences are identified as “Intergenic region:” followed by a numerical identification number), as well as SNP context sequences and other SNP information for any SNPs that lie within each intergenic region (and such SNPs are identified as “INTERGENIC” for SNP type).

[0071] NOTE: The transcript, protein, and transcript-based SNP context sequences are provided in both Table 1 and in the Sequence Listing. The genomic and genomic-based SNP context sequences are provided in both Table 2 and in the Sequence Listing. SEQ ID NOS are indicated in Table 1 for each transcript sequence (SEQ ID NOS:1-126), protein sequence (SEQ ID NOS:127-252), and transcript-based SNP context sequence (SEQ ID NOS:253-1584), and SEQ ID NOS are indicated in Table 2 for each genomic sequence (SEQ ID NOS:1585-1662), and genomic-based SNP context sequence (SEQ ID NOS: 1663-17,275).

[0072] The SNP information includes:

[0073] context sequence (taken from the transcript sequence in Table 1, and taken from the genomic sequence in Table 2) with the SNP represented by its IUB code, including 100 bp upstream (5′) of the SNP position plus 100 bp downstream (3′) of the SNP position (the transcript-based SNP context sequences in Table 1 are provided in the Sequence Listing as SEQ ID NOS:253-1584; the genomic-based SNP context sequences in Table 2 are provided in the Sequence Listing as SEQ ID NOS:1663-17,275).

[0074] Celera hCV internal identification number for the SNP (in some instances, an “hDV” number is given instead of an “hCV” number)

[0075] SNP position [position of the SNP within the given transcript sequence (Table 1) or within the given genomic sequence (Table 2)]

[0076] SNP source (may include any combination of one or more of the following five codes, depending on which internal sequencing projects and/or public databases the SNP has been observed in: “Applera”=SNP observed during the re-sequencing of genes and regulatory regions of 39 individuals, “Celera”=SNP observed during shotgun sequencing and assembly of the Celera human genome sequence, “Celera Diagnostics”=SNP observed during re-sequencing of nucleic acid samples from individuals who have a disease, “dbSNP”=SNP observed in the dbSNP public database, “HGBASE”=SNP observed in the HGBASE public database, “HGMD”=SNP observed in the Human Gene Mutation Database (HGMD) public database, “HapMap”=SNP observed in the International HapMap Project public database, “CSNP”=SNP observed in an internal Applied Biosystems (Foster City, Calif.) database of coding SNPS (cSNPs)) (NOTE: multiple “Applera” source entries for a single SNP indicate that the same SNP was covered by multiple overlapping amplification products and the re-sequencing results (e.g., observed allele counts) from each of these amplification products is being provided)

[0077] Population/allele/allele count information in the format of [population1 (first_allele,count|second_allele,count)population2(first_allele,count|second_allele,count) total (first_allele,total count|second-allele,total count)]. The information in this field includes populations/ethnic groups in which particular SNP alleles have been observed (“cau”=Caucasian, “his”=Hispanic, “chn”=Chinese, and “afr”=African-American, “jpn”=Japanese, “ind”=Indian, “mex”=Mexican, “ain”=“American Indian, “cra”=Celera donor, “no_pop”=no population information available), identified SNP alleles, and observed allele counts (within each population group and total allele counts), where available [“−” in the allele field represents a deletion allele of an insertion/deletion (“indel”) polymorphism (in which case the corresponding insertion allele, which may be comprised of one or more nucleotides, is indicated in the allele field on the opposite side of the “|”); “−“in the count field indicates that allele count information is not available]. For certain SNPs from the public dbSNP database, population/ethnic information is indicated as follows (this population information is publicly available in dbSNP): “HISP1”=human individual DNA (anonymized samples) from 23 individuals of self-described HISPANIC heritage; “PAC1”=human individual DNA (anonymized samples) from 24 individuals of self-described PACIFIC RIM heritage; “CAUC1”=human individual DNA (anonymized samples) from 31 individuals of self-described CAUCASIAN heritage; “AFR1”=human individual DNA (anonymized samples) from 24 individuals of self-described AFRICAN/AFRICAN AMERICAN heritage; “P1”=human individual DNA (anonymized samples) from 102 individuals of self-described heritage; “PA130299515”; “SC_{—}12_A”=SANGER 12 DNAs of Asian origin from Corielle cell repositories, 6 of which are male and 6 female; “SC_{—}12_C”=SANGER 12 DNAs of Caucasian origin from Corielle cell repositories from the CEPH/UTAH library. Six male and 6 female; “SC_{—}12_AA”=SANGER 12 DNAs of African-American origin from Corielle cell repositories 6 of which are male and 6 female; “SC_{—}95_C”=SANGER 95 DNAs of Caucasian origin from Corielle cell repositories from the CEPH/UTAH library; and “SC_{—}12_CA”=Caucasians−12 DNAs from Corielle cell repositories that are from the CEPH/UTAH library. Six male and 6 female.

[0078] NOTE: For SNPs of “Applera” SNP source, genes/regulatory regions of 39 individuals (20 Caucasians and 19 African Americans) were re-sequenced and, since each SNP position is represented by two chromosomes in each individual (with the exception of SNPs on X and Y chromosomes in males, for which each SNP position is represented by a single chromosome), up to 78 chromosomes were genotyped for each SNP position. Thus, the sum of the African-American (“afr”) allele counts is up to 38, the sum of the Caucasian allele counts (“cau”) is up to 40, and the total sum of all allele counts is up to 78.

[0079] (NOTE: semicolons separate population/allele/count information corresponding to each indicated SNP source; i.e., if four SNP sources are indicated, such as “Celera”, “dbSNP”, “HGBASE”, and “HGMD”, then population/allele/count information is provided in four groups which are separated by semicolons and listed in the same order as the listing of SNP sources, with each population/allele/count information group corresponding to the respective SNP source based on order; thus, in this example, the first population/allele/count information group would correspond to the first listed SNP source (Celera) and the third population/allele/count information group separated by semicolons would correspond to the third listed SNP source (HGBASE); if population/allele/count information is not available for any particular SNP source, then a pair of semicolons is still inserted as a place-holder in order to maintain correspondence between the list of SNP sources and the corresponding listing of population/allele/count information)

[0080] SNP type (e.g., location within gene/transcript and/or predicted functional effect) [“MIS-SENSE MUTATION”=SNP causes a change in the encoded amino acid (i.e., a non-synonymous coding SNP); “SILENT MUTATION”=SNP does not cause a change in the encoded amino acid (i.e., a synonymous coding SNP); “STOP CODON MUTATION”=SNP is located in a stop codon; “NONSENSE MUTATION”=SNP creates or destroys a stop codon; “UTR 5”=SNP is located in a 5′ UTR of a transcript; “UTR 3”=SNP is located in a 3′ UTR of a transcript; “PUTATIVE UTR 5”=SNP is located in a putative 5′ UTR; “PUTATIVE UTR 3”=SNP is located in a putative 3′ UTR; “DONOR SPLICE SITE” SNP is located in a donor splice site (5′ intron boundary); “ACCEPTOR SPLICE SITE”=SNP is located in an acceptor splice site (3′ intron boundary); “CODING REGION”=SNP is located in a protein-coding region of the transcript; “EXON”=SNP is located in an exon; “INTRON”=SNP is located in an intron; “hmCS”=SNP is located in a human-mouse conserved segment; “TFBS”=SNP is located in a transcription factor binding site; “UNKNOWN”=SNP type is not defined; “INTERGENIC”=SNP is intergenic, i.e., outside of any gene boundary]

[0081] Protein coding information (Table 1 only), where relevant, in the format of [protein SEQ ID NO:#, amino acid position, (amino acid-1, codonl) (amino acid-2, codon2)]. The information in this field includes SEQ ID NO of the encoded protein sequence, position of the amino acid residue within the protein identified by the SEQ ID NO that is encoded by the codon containing the SNP, amino acids (represented by one-letter amino acid codes) that are encoded by the alternative SNP alleles (in the case of stop codons, “X” is used for the one-letter amino acid code), and alternative codons containing the alternative SNP nucleotides which encode the amino acid residues (thus, for example, for missense mutation-type SNPs, at least two different amino acids and at least two different codons are generally indicated; for silent mutation-type SNPs, one amino acid and at least two different codons are generally indicated, etc.). In instances where the SNP is located outside of a protein-coding region (e.g., in a UTR region), “None” is indicated following the protein SEQ ID NO.

[0082] Description of Table 3 and Table 4

[0083] Tables 3 and 4 (both provided on the CD-R) provide a list of a subset of SNPs from Table 1 (in the case of Table 3) or Table 2 (in the case of Table 4) for which the SNP source falls into one of the following three categories: 1) SNPs for which the SNP source is only “Applera” and none other, 2) SNPs for which the SNP source is only “Celera Diagnostics” and none other, and 3) SNPs for which the SNP source is both “Applera” and “Celera Diagnostics” but none other.

[0084] These SNPs have not been observed in any of the public databases (dbSNP, HGBASE, and HGMD), and were also not observed during shotgun sequencing and assembly of the Celera human genome sequence (i.e., “Celera” SNP source). Tables 3 and 4 provide the hCV identification number (or hDV identification number for SNPs having “Celera Diagnostics” SNP source) and the SEQ ID NO of the context sequence for each of these SNPs.

[0085] Description of Table 5

[0086] Table 5 provides sequences (SEQ ID NOS:17,276-17,377) of primers that have been synthesized and used in the laboratory to carry out allele-specific PCR reactions in order to assay the SNPs disclosed in Table 6 during the course of association studies to verify the association of these SNPs with MI.

[0087] Table 5 provides the following:

[0088] the column labeled “Marker” provides an hCV identification number for each SNP site

[0089] the column labeled “Alleles” designates the two alternative alleles at the SNP site identified by the hCV identification number that are targeted by the allele-specific primers (the allele-specific primers are shown as “Sequence A” and “Sequence B”) [NOTE: Alleles may be presented in Table 5 based on a different orientation (i.e., the reverse complement) relative to how the same alleles are presented in Tables 1, 2, and 6].

[0090] the column labeled “Sequence A (allele-specific primer)” provides an allele-specific primer that is specific for an allele designated in the “Alleles” column

[0091] the column labeled “Sequence B (allele-specific primer)” provides an allele-specific primer that is specific for the other allele designated in the “Alleles” column

[0092] the column labeled “Sequence C (common primer)” provides a common primer that is used in conjunction with each of the allele-specific primers (the “Sequence A” primer and the “Sequence B” primer) and which hybridizes at a site away from the SNP position.

[0093] All primer sequences are given in the 5′ to 3′ direction.

[0094] Each of the nucleotides designated in the “Alleles” column matches or is the reverse complement of (depending on the orientation of the primer relative to the designated allele) the 3′ nucleotide of the allele-specific primer (either “Sequence A” or “Sequence B”) that is specific for that allele.

[0095] Description of Table 6

[0096] Table 6 provides results of statistical analyses for certain SNPs disclosed in Tables 1-4 (SNPs can be cross-referenced between tables based on their hCV identification numbers), and the association of these SNPs with MI. The statistical results provided in Table 6 show that the association of these SNPs with MI is supported by p-values<0.1 in an allelic association test or a genotype association based on dominant or recessive modes of inheritance.

[0097] Table 6 presents statistical associations of SNPs with design endpoints. The column labeled “SNP Marker” presents each SNP as identified by its unique identifier number. The column labeled “Gene Name” presents the common name of the gene containing the SNP. In cases where the gene name is not known or the SNP is found in an intergenic region, the word “none” is present. The column labeled “Allele” presents a variant nucleotide for each of the identified SNPs. The allele may be presented in Tables 1-4 as the reverse complement of the allele presented in Table 6. The column labeled “Mode” indicates the genetic model under which the p-value for the association was calculated. When 2 copies of the SNP are required to see the observed effect the mode is recessive. When 1 or 2 copies of the SNP are required to see the association the mode is dominant. When the association was found by comparing the frequency of the allele in the case population vs. the control population, the mode is allelic. The allelic mode closely approximates an additive model.

[0098] The data obtained from the individual sample sets are presented in two groups of columns. The groups of columns labeled “CCF Samples” means the samples were obtained from the Cleveland Clinic. This sample set contains samples obtained from patients that had a variety of vascular diseases (i.e., stroke, coronary artery disease etc.) including MI. In the analysis performed here, only those patients that had an MI were included in the case populations. The groups of columns labeled “UCSF Samples” means the samples were obtained from the University of California, San Francisco. These samples were obtained from patients that had a variety of vascular diseases including MI. Case samples were limited to patients that had an MI. The column labeled “Design” presents the MI endpoint that a particular SNP is associated with. In CCF design A, MI cases were compared to non-MI controls that had less than 50% stenosis in their coronary arteries. In CCF design B, MI cases were compared to controls that had no documented MI or detectable stenosis. In CCF design C, MI cases were compared to controls with no documented MI. However, these controls might have had other vascular diseases. In UCSF design A, MI cases were compared to controls that had no MI but the patients might have had coronary artery stenosis. In UCSF design B, premature MI cases (MI occurring in patients<60 years of age) were compared to controls where the patients did not have MI and were older (age>60). The column labeled “Strata” indicates the group of individuals in which the association was observed. “All” indicates that the association was observed in all individuals, “M” indicates the association was observed in males, “F” indicates the association was observed in females, “smoke” indicates the association was observed in smokers. The column labeled “P-value” indicates the results of either the Chi-squared test (Rec or Dom) or the Fisher Exact test (Allelic) to determine if the qualitative phenotype is a function of the SNP genotype. The column labeled “OR” indicates an approximation of the relative risk for an individual for the defined endpoint associated with the SNP. ORs less than 1 indicate the indicated allele is protective for MI, and ORs greater than 1 indicate the indicated allele increases the risk of having MI.

### DESCRIPTION OF THE FIGURE

[0099] FIG. 1 provides a diagrammatic representation of a computer-based discovery system containing the SNP information of the present invention in computer readable form.

### DETAILED DESCRIPTION OF THE INVENTION

[0100] The present invention provides SNPs associated with CHD, and in particular MI, nucleic acid molecules containing SNPs, methods and reagents for the detection of the SNPs disclosed herein, uses of these SNPs for the development of detection reagents, and assays or kits that utilize such reagents. The MI-associated SNPs disclosed herein are useful for diagnosing, screening for, and evaluating predisposition to MI and related pathologies in humans. Furthermore, such SNPs and their encoded products are useful targets for the development of therapeutic agents.

[0101] A large number of SNPs have been identified from re-sequencing DNA from 39 individuals, and they are indicated as “Applera” SNP source in Tables 1-2. Their allele frequencies observed in each of the Caucasian and African-American ethnic groups are provided. Additional SNPs included herein were previously identified during shotgun sequencing and assembly of the human genome, and they are indicated as “Celera” SNP source in Tables 1-2. Furthermore, the information provided in Table 1-2, particularly the allele frequency information obtained from 39 individuals and the identification of the precise position of each SNP within each gene/transcript, allows haplotypes (i.e., groups of SNPs that are co-inherited) to be readily inferred. The present invention encompasses SNP haplotypes, as well as individual SNPs.

[0102] Thus, the present invention provides individual SNPs associated with CHD, and in particular MI, as well as combinations of SNPs and haplotypes in genetic regions associated with CHD, and in particular MI, polymorphic/variant transcript sequences (SEQ ID NOS:1-126) and genomic sequences (SEQ ID NOS:1585-1662) containing SNPs, encoded amino acid sequences (SEQ ID NOS: 127-252), and both transcript-based SNP context sequences (SEQ ID NOS: 253-1584) and genomic-based SNP context sequences (SEQ ID NOS:1663-17,275) (transcript sequences, protein sequences, and transcript-based SNP context sequences are provided in Table 1 and the Sequence Listing; genomic sequences and genomic-based SNP context sequences are provided in Table 2 and the Sequence Listing), methods of detecting these polymorphisms in a test sample, methods of determining the risk of an individual of having or developing MI, methods of screening for compounds useful for treating disorders associated with a variant gene/protein such as MI, compounds identified by these screening methods, methods of using the disclosed SNPs to select a treatment strategy, methods of treating a disorder associated with a variant gene/protein (i.e., therapeutic methods), methods of determining if an individual is likely to respond to a specific treatment such as statins and methods of using the SNPs of the present invention for human identification.

[0103] The present invention provides novel SNPs associated with MI, as well as SNPs that were previously known in the art, but were not previously known to be associated with MI. Accordingly, the present invention provides novel compositions and methods based on the novel SNPs disclosed herein, and also provides novel methods of using the known, but previously unassociated, SNPs in methods relating to MI (e.g., for diagnosing MI, etc.). In Tables 1-2, known SNPs are identified based on the public database in which they have been observed, which is indicated as one or more of the following SNP types: “dbSNP”=SNP observed in dbSNP, “HGBASE”=SNP observed in HGBASE, and “HGMD”=SNP observed in the Human Gene Mutation Database (HGMD). Novel SNPs for which the SNP source is only “Applera” and none other, i.e., those that have not been observed in any public databases and which were also not observed during shotgun sequencing and assembly of the Celera human genome sequence (i.e., “Celera” SNP source), are indicated in Tables 3-4.

[0104] Particular SNP alleles of the present invention can be associated with either an increased risk of having or developing MI, or a decreased risk of having or developing MI. SNP alleles that are associated with a decreased risk of having or developing MI may be referred to as “protective” alleles, and SNP alleles that are associated with an increased risk of having or developing MI may be referred to as “susceptibility” alleles, “risk” alleles, or “risk factors”. Thus, whereas certain SNPs (or their encoded products) can be assayed to determine whether an individual possesses a SNP allele that is indicative of an increased risk of having or developing MI (i.e., a susceptibility allele), other SNPs (or their encoded products) can be assayed to determine whether an individual possesses a SNP allele that is indicative of a decreased risk of having or developing MI (i.e., a protective allele). Similarly, particular SNP alleles of the present invention can be associated with either an increased or decreased likelihood of responding to a particular treatment or therapeutic compound, or an increased or decreased likelihood of experiencing toxic effects from a particular treatment or therapeutic compound. The term “altered” may be used herein to encompass either of these two possibilities (e.g., an increased or a decreased risk/likelihood).

[0105] Those skilled in the art will readily recognize that nucleic acid molecules may be double-stranded molecules and that reference to a particular site on one strand refers, as well, to the corresponding site on a complementary strand. In defining a SNP position, SNP allele, or nucleotide sequence, reference to an adenine, a thymine (uridine), a cytosine, or a guanine at a particular site on one strand of a nucleic acid molecule also defines the thymine (uridine), adenine, guanine, or cytosine (respectively) at the corresponding site on a complementary strand of the nucleic acid molecule. Thus, reference may be made to either strand in order to refer to a particular SNP position, SNP allele, or nucleotide sequence. Probes and primers, may be designed to hybridize to either strand and SNP genotyping methods disclosed herein may generally target either strand. Throughout the specification, in identifying a SNP position, reference is generally made to the protein-encoding strand, only for the purpose of convenience.

[0106] References to variant peptides, polypeptides, or proteins of the present invention include peptides, polypeptides, proteins, or fragments thereof, that contain at least one amino acid residue that differs from the corresponding amino acid sequence of the art-known peptide/polypeptide/protein (the art-known protein may be interchangeably referred to as the “wild-type”, “reference”, or “normal” protein). Such variant peptides/polypeptides/proteins can result from a codon change caused by a nonsynonymous nucleotide substitution at a protein-coding SNP position (i.e., a missense mutation) disclosed by the present invention. Variant peptides/polypeptides/proteins of the present invention can also result from a nonsense mutation, i.e., a SNP that creates a premature stop codon, a SNP that generates a read-through mutation by abolishing a stop codon, or due to any SNP disclosed by the present invention that otherwise alters the structure, function/activity, or expression of a protein, such as a SNP in a regulatory region (e.g. a promoter or enhancer) or a SNP that leads to alternative or defective splicing, such as a SNP in an intron or a SNP at an exon/intron boundary. As used herein, the terms “polypeptide”, “peptide”, and “protein” are used interchangeably.

[0107] Isolated Nucleic Acid Molecules and SNP Detection Reagents & Kits

[0108] Tables 1 and 2 provide a variety of information about each SNP of the present invention that is associated with CHD, and in particular MI, including the transcript sequences (SEQ ID NOS:1-126), genomic sequences (SEQ ID NOS:1585-1662), and protein sequences (SEQ ID NOS:127-252) of the encoded gene products (with the SNPs indicated by IuB codes in the nucleic acid sequences). In addition, Tables 1 and 2 include SNP context sequences, which generally include 100 nucleotide upstream (5′) plus 100 nucleotides downstream (3′) of each SNP position (SEQ ID NOS:253-1584 correspond to transcript-based SNP context sequences disclosed in Table 1, and SEQ ID NOS:1663-17,275 correspond to genomic-based context sequences disclosed in Table 2), the alternative nucleotides (alleles) at each SNP position, and additional information about the variant where relevant, such as SNP type (coding, missense, splice site, UTR, etc.), human populations in which the SNP was observed, observed allele frequencies, information about the encoded protein, etc.

[0109] Isolated Nucleic Acid Molecules

[0110] The present invention provides isolated nucleic acid molecules that contain one or more SNPs disclosed Table 1 and/or Table 2. Preferred isolated nucleic acid molecules contain one or more SNPs identified in Table 3 and/or Table 4. Isolated nucleic acid molecules containing one or more SNPs disclosed in at least one of Tables 1-4 may be interchangeably referred to throughout the present text as “SNP-containing nucleic acid molecules”. Isolated nucleic acid molecules may optionally encode a full-length variant protein or fragment thereof. The isolated nucleic acid molecules of the present invention also include probes and primers (which are described in greater detail below in the section entitled “SNP Detection Reagents”), which may be used for assaying the disclosed SNPs, and isolated full-length genes, transcripts, cDNA molecules, and fragments thereof, which may be used for such purposes as expressing an encoded protein.

[0111] As used herein, an “isolated nucleic acid molecule” generally is one that contains a SNP of the present invention or one that hybridizes to such molecule such as a nucleic acid with a complementary sequence, and is separated from most other nucleic acids present in the natural source of the nucleic acid molecule. Moreover, an “isolated” nucleic acid molecule, such as a cDNA molecule containing a SNP of the present invention, can be substantially free of other cellular material, or culture medium when produced by recombinant techniques, or chemical precursors or other chemicals when chemically synthesized. A nucleic acid molecule can be fused to other coding or regulatory sequences and still be considered “isolated”. Nucleic acid molecules present in non-human transgenic animals, which do not naturally occur in the animal, are also considered “isolated”. For example, recombinant DNA molecules contained in a vector are considered “isolated”. Further examples of“isolated” DNA molecules include recombinant DNA molecules maintained in heterologous host cells, and purified (partially or substantially) DNA molecules in solution. Isolated RNA molecules include in vivo or in vitro RNA transcripts of the isolated SNP-containing DNA molecules of the present invention. Isolated nucleic acid molecules according to the present invention further include such molecules produced synthetically.

[0112] Generally, an isolated SNP-containing nucleic acid molecule comprises one or more SNP positions disclosed by the present invention with flanking nucleotide sequences on either side of the SNP positions. A flanking sequence can include nucleotide residues that are naturally associated with the SNP site and/or heterologous nucleotide sequences. Preferably the flanking sequence is up to about 500, 300, 100, 60, 50, 30, 25, 20, 15, 10, 8, or 4 nucleotides (or any other length in-between) on either side of a SNP position, or as long as the full-length gene or entire protein-coding sequence (or any portion thereof such as an exon), especially if the SNP-containing nucleic acid molecule is to be used to produce a protein or protein fragment.

[0113] For full-length genes and entire protein-coding sequences, a SNP flanking sequence can be, for example, up to about 5 KB, 4 KB, 3 KB, 2 KB, 1 KB on either side of the SNP. Furthermore, in such instances, the isolated nucleic acid molecule comprises exonic sequences (including protein-coding and/or non-coding exonic sequences), but may also include intronic sequences. Thus, any protein coding sequence may be either contiguous or separated by introns. The important point is that the nucleic acid is isolated from remote and unimportant flanking sequences and is of appropriate length such that it can be subjected to the specific manipulations or uses described herein such as recombinant protein expression, preparation of probes and primers for assaying the SNP position, and other uses specific to the SNP-containing nucleic acid sequences.

[0114] An isolated SNP-containing nucleic acid molecule can comprise, for example, a full-length gene or transcript, such as a gene isolated from genomic DNA (e.g., by cloning or PCR amplification), a cDNA molecule, or an mRNA transcript molecule. Polymorphic transcript sequences are provided in Table 1 and in the Sequence Listing (SEQ ID NOS: 1-126), and polymorphic genomic sequences are provided in Table 2 and in the Sequence Listing (SEQ ID NOS:1585-1662). Furthermore, fragments of such full-length genes and transcripts that contain one or more SNPs disclosed herein are also encompassed by the present invention, and such fragments may be used, for example, to express any part of a protein, such as a particular functional domain or an antigenic epitope.

[0115] Thus, the present invention also encompasses fragments of the nucleic acid sequences provided in Tables 1-2 (transcript sequences are provided in Table 1 as SEQ ID NOS:1-126, genomic sequences are provided in Table 2 as SEQ ID NOS:1585-1662, transcript-based SNP context sequences are provided in Table 1 as SEQ ID NO:253-1584, and genomic-based SNP context sequences are provided in Table 2 as SEQ ID NO: 1663-17,275) and their complements. A fragment typically comprises a contiguous nucleotide sequence at least about 8 or more nucleotides, more preferably at least about 12 or more nucleotides, and even more preferably at least about 16 or more nucleotides. Further, a fragment could comprise at least about 18, 20, 22, 25, 30, 40, 50, 60, 80, 100, 150, 200, 250 or 500 (or any other number in-between) nucleotides in length. The length of the fragment will be based on its intended use. For example, the fragment can encode epitope-bearing regions of a variant peptide or regions of a variant peptide that differ from the normal/wild-type protein, or can be useful as a polynucleotide probe or primer. Such fragments can be isolated using the nucleotide sequences provided in Table 1 and/or Table 2 for the synthesis of a polynucleotide probe. A labeled probe can then be used, for example, to screen a cDNA library, genomic DNA library, or mRNA to isolate nucleic acid corresponding to the coding region. Further, primers can be used in amplification reactions, such as for purposes of assaying one or more SNPs sites or for cloning specific regions of a gene.

[0116] An isolated nucleic acid molecule of the present invention further encompasses a SNP-containing polynucleotide that is the product of any one of a variety of nucleic acid amplification methods, which are used to increase the copy numbers of a polynucleotide of interest in a nucleic acid sample. Such amplification methods are well known in the art, and they include but are not limited to, polymerase chain reaction (PCR) (U.S. Pat. Nos. 4,683,195; and 4,683,202; PCR Technology: Principles and Applications for DNA Amplification, ed. H. A. Erlich, Freeman Press, NY, N.Y., 1992), ligase chain reaction (LCR) (Wu and Wallace, Genomics 4:560, 1989; Landegren et al., Science 241:1077, 1988), strand displacement amplification (SDA) (U.S. Pat. Nos. 5,270,184; and 5,422,252), transcription-mediated amplification (TMA) (U.S. Pat. No. 5,399,491), linked linear amplification (LLA) (U.S. Pat. No. 6,027,923), and the like, and isothermal amplification methods such as nucleic acid sequence based amplification (NASBA), and self-sustained sequence replication (Guatelli et al., Proc. Natl. Acad. Sci. USA 87: 1874, 1990). Based on such methodologies, a person skilled in the art can readily design primers in any suitable regions 5′ and 3′ to a SNP disclosed herein. Such primers may be used to amplify DNA of any length so long that it contains the SNP of interest in its sequence.

[0117] As used herein, an “amplified polynucleotide” of the invention is a SNP-containing nucleic acid molecule whose amount has been increased at least two fold by any nucleic acid amplification method performed in vitro as compared to its starting amount in a test sample. In other preferred embodiments, an amplified polynucleotide is the result of at least ten fold, fifty fold, one hundred fold, one thousand fold, or even ten thousand fold increase as compared to its starting amount in a test sample. In a typical PCR amplification, a polynucleotide of interest is often amplified at least fifty thousand fold in amount over the unamplified genomic DNA, but the precise amount of amplification needed for an assay depends on the sensitivity of the subsequent detection method used.

[0118] Generally, an amplified polynucleotide is at least about 16 nucleotides in length. More typically, an amplified polynucleotide is at least about 20 nucleotides in length. In a preferred embodiment of the invention, an amplified polynucleotide is at least about 30 nucleotides in length. In a more preferred embodiment of the invention, an amplified polynucleotide is at least about 32, 40, 45, 50, or 60 nucleotides in length. In yet another preferred embodiment of the invention, an amplified polynucleotide is at least about 100, 200, 300, 400, or 500 nucleotides in length. While the total length of an amplified polynucleotide of the invention can be as long as an exon, an intron or the entire gene where the SNP of interest resides, an amplified product is typically up to about 1,000 nucleotides in length (although certain amplification methods may generate amplified products greater than 1000 nucleotides in length). More preferably, an amplified polynucleotide is not greater than about 600-700 nucleotides in length. It is understood that irrespective of the length of an amplified polynucleotide, a SNP of interest may be located anywhere along its sequence.

[0119] In a specific embodiment of the invention, the amplified product is at least about 201 nucleotides in length, comprises one of the transcript-based context sequences or the genomic-based context sequences shown in Tables 1-2. Such a product may have additional sequences on its 5′ end or 3′ end or both. In another embodiment, the amplified product is about 101 nucleotides in length, and it contains a SNP disclosed herein. Preferably, the SNP is located at the middle of the amplified product (e.g., at position 101 in an amplified product that is 201 nucleotides in length, or at position 51 in an amplified product that is 101 nucleotides in length), or within 1, 2, 3, 4, 5, 6, 7, 8, 9, 10, 12, 15, or 20 nucleotides from the middle of the amplified product (however, as indicated above, the SNP of interest may be located anywhere along the length of the amplified product).

[0120] The present invention provides isolated nucleic acid molecules that comprise, consist of, or consist essentially of one or more polynucleotide sequences that contain one or more SNPs disclosed herein, complements thereof, and SNP-containing fragments thereof.

[0121] Accordingly, the present invention provides nucleic acid molecules that consist of any of the nucleotide sequences shown in Table 1 and/or Table 2 (transcript sequences are provided in Table 1 as SEQ ID NOS: 1-126, genomic sequences are provided in Table 2 as SEQ ID NOS:1585-1662, transcript-based SNP context sequences are provided in Table 1 as SEQ ID NO:253-1584, and genomic-based SNP context sequences are provided in Table 2 as SEQ ID NO: 1663-17,275), or any nucleic acid molecule that encodes any of the variant proteins provided in Table 1 (SEQ ID NOS: 127-252). A nucleic acid molecule consists of a nucleotide sequence when the nucleotide sequence is the complete nucleotide sequence of the nucleic acid molecule.

[0122] The present invention further provides nucleic acid molecules that consist essentially of any of the nucleotide sequences shown in Table 1 and/or Table 2 (transcript sequences are provided in Table 1 as SEQ ID NOS:1-126, genomic sequences are provided in Table 2 as SEQ ID NOS: 1585-1662, transcript-based SNP context sequences are provided in Table 1 as SEQ ID NO:253-1584, and genomic-based SNP context sequences are provided in Table 2 as SEQ ID NO:1663-17,275), or any nucleic acid molecule that encodes any of the variant proteins provided in Table 1 (SEQ ID NOS:127-252). A nucleic acid molecule consists essentially of a nucleotide sequence when such a nucleotide sequence is present with only a few additional nucleotide residues in the final nucleic acid molecule.

[0123] The present invention further provides nucleic acid molecules that comprise any of the nucleotide sequences shown in Table 1 and/or Table 2 or a SNP-containing fragment thereof (transcript sequences are provided in Table 1 as SEQ ID NOS: 1-126, genomic sequences are provided in Table 2 as SEQ ID NOS:1585-1662, transcript-based SNP context sequences are provided in Table 1 as SEQ ID NO:253-1584, and genomic-based SNP context sequences are provided in Table 2 as SEQ ID NO:1663-17,275), or any nucleic acid molecule that encodes any of the variant proteins provided in Table 1 (SEQ ID NOS:127-252). A nucleic acid molecule comprises a nucleotide sequence when the nucleotide sequence is at least part of the final nucleotide sequence of the nucleic acid molecule. In such a fashion, the nucleic acid molecule can be only the nucleotide sequence or have additional nucleotide residues, such as residues that are naturally associated with it or heterologous nucleotide sequences. Such a nucleic acid molecule can have one to a few additional nucleotides or can comprise many more additional nucleotides. A brief description of how various types of these nucleic acid molecules can be readily made and isolated is provided below, and such techniques are well known to those of ordinary skill in the art (Sambrook and Russell, 2000, Molecular Cloning: A Laboratory Manual, Cold Spring Harbor Press, NY).

[0124] The isolated nucleic acid molecules can encode mature proteins plus additional amino or carboxyl-terminal amino acids or both, or amino acids interior to the mature peptide (when the mature form has more than one peptide chain, for instance). Such sequences may play a role in processing of a protein from precursor to a mature form, facilitate protein trafficking, prolong or shorten protein half-life, or facilitate manipulation of a protein for assay or production. As generally is the case in situ, the additional amino acids may be processed away from the mature protein by cellular enzymes.

[0125] Thus, the isolated nucleic acid molecules include, but are not limited to, nucleic acid molecules having a sequence encoding a peptide alone, a sequence encoding a mature peptide and additional coding sequences such as a leader or secretory sequence (e.g., a pre-pro or pro-protein sequence), a sequence encoding a mature peptide with or without additional coding sequences, plus additional non-coding sequences, for example introns and non-coding 5′ and 3′ sequences such as transcribed but untranslated sequences that play a role in, for example, transcription, mRNA processing (including splicing and polyadenylation signals), ribosome binding, and/or stability of mRNA. In addition, the nucleic acid molecules may be fused to heterologous marker sequences encoding, for example, a peptide that facilitates purification.

[0126] Isolated nucleic acid molecules can be in the form of RNA, such as mRNA, or in the form DNA, including cDNA and genomic DNA, which may be obtained, for example, by molecular cloning or produced by chemical synthetic techniques or by a combination thereof (Sambrook and Russell, 2000, Molecular Cloning: A Laboratory Manual, Cold Spring Harbor Press, NY). Furthermore, isolated nucleic acid molecules, particularly SNP detection reagents such as probes and primers, can also be partially or completely in the form of one or more types of nucleic acid analogs, such as peptide nucleic acid (PNA) (U.S. Pat. Nos. 5,539,082; 5,527,675; 5,623,049; 5,714,331). The nucleic acid, especially DNA, can be double-stranded or single-stranded. Single-stranded nucleic acid can be the coding strand (sense strand) or the complementary non-coding strand (anti-sense strand). DNA, RNA, or PNA segments can be assembled, for example, from fragments of the human genome (in the case of DNA or RNA) or single nucleotides, short oligonucleotide linkers, or from a series of oligonucleotides, to provide a synthetic nucleic acid molecule. Nucleic acid molecules can be readily synthesized using the sequences provided herein as a reference; oligonucleotide and PNA oligomer synthesis techniques are well known in the art (see, e.g., Corey, “Peptide nucleic acids: expanding the scope of nucleic acid recognition”, Trends Biotechnol. June 1997;15(6):224-9, and Hyrup et al., “Peptide nucleic acids (PNA): synthesis, properties and potential applications”, Bioorg Med Chem. January 1996;4(l):5-23). Furthermore, large-scale automated oligonucleotide/PNA synthesis (including synthesis on an array or bead surface or other solid support) can readily be accomplished using commercially available nucleic acid synthesizers, such as the Applied Biosystems (Foster City, Calif.) 3900 High-Throughput DNA Synthesizer or Expedite 8909 Nucleic Acid Synthesis System, and the sequence information provided herein.

[0127] The present invention encompasses nucleic acid analogs that contain modified, synthetic, or non-naturally occurring nucleotides or structural elements or other alternative/modified nucleic acid chemistries known in the art. Such nucleic acid analogs are useful, for example, as detection reagents (e.g., primers/probes) for detecting one or more SNPs identified in Table 1 and/or Table 2. Furthermore, kits/systems (such as beads, arrays, etc.) that include these analogs are also encompassed by the present invention. For example, PNA oligomers that are based on the polymorphic sequences of the present invention are specifically contemplated. PNA oligomers are analogs of DNA which the phosphate backbone is replaced with a peptide-like backbone (Lagriffoul et al., Bioorganic & Medicinal Chemistry Letters, 4: 1081-1082 (1994), Petersen et al., Bioorganic & Medicinal Chemistry Letters, 6: 793-796 (1996), Kumar et al., Organic Letters 3(9): 1269-1272 (2001), W096/04000). PNA hybridizes to complementary RNA or DNA with higher affinity and specificity than conventional oligonucleotides and oligonucleotide analogs. The properties of PNA enable novel molecular biology and biochemistry applications unachievable with traditional oligonucleotides and peptides.

[0128] Additional examples of nucleic acid modifications that improve the binding properties and/or stability of a nucleic acid include the use of base analogs such as inosine, intercalators (U.S. Pat. No. 4,835,263) and the minor groove binders (U.S. Pat. No. 5,801,115). Thus, references herein to nucleic acid molecules, SNP-containing nucleic acid molecules, SNP detection reagents (e.g., probes and primers), oligonucleotides/polynucleotides include PNA oligomers and other nucleic acid analogs. Other examples of nucleic acid analogs and alternative/modified nucleic acid chemistries known in the art are described in Current Protocols in Nucleic Acid Chemistry, John Wiley & Sons, N.Y. (2002).

[0129] The present invention further provides nucleic acid molecules that encode fragments of the variant polypeptides disclosed herein as well as nucleic acid molecules that encode obvious variants of such variant polypeptides. Such nucleic acid molecules may be naturally occurring, such as paralogs (different locus) and orthologs (different organism), or may be constructed by recombinant DNA methods or by chemical synthesis. Non-naturally occurring variants may be made by mutagenesis techniques, including those applied to nucleic acid molecules, cells, or organisms. Accordingly, the variants can contain nucleotide substitutions, deletions, inversions and insertions (in addition to the SNPs disclosed in Tables 1-2). Variation can occur in either or both the coding and non-coding regions. The variations can produce conservative and/or non-conservative amino acid substitutions.

[0130] Further variants of the nucleic acid molecules disclosed in Tables 1-2, such as naturally occurring allelic variants (as well as orthologs and paralogs) and synthetic variants produced by mutagenesis techniques, can be identified and/or produced using methods well known in the art. Such further variants can comprise a nucleotide sequence that shares at least 70-80%, 80-85%, 85-90%, 91%, 92%, 93%, 94%, 95% 96%, 97%, 98%, or 99% sequence identity with a nucleic acid sequence disclosed in Table 1 and/or Table 2 (or a fragment thereof) and that includes a novel SNP allele disclosed in Table 1 and/or Table 2. Further, variants can comprise a nucleotide sequence that encodes a polypeptide that shares at least 70-80%, 80-85%, 85-90%, 91%, 92%, 93%, 94%, 95%, 96%, 97%, 98%, or 99% sequence identity with a polypeptide sequence disclosed in Table 1 (or a fragment thereof) and that includes a novel SNP allele disclosed in Table 1 and/or Table 2. Thus, an aspect of the present invention that is specifically contemplated are isolated nucleic acid molecules that have a certain degree of sequence variation compared with the sequences shown in Tables 1-2, but that contain a novel SNP allele disclosed herein. In other words, as long as an isolated nucleic acid molecule contains a novel SNP allele disclosed herein, other portions of the nucleic acid molecule that flank the novel SNP allele can vary to some degree from the specific transcript, genomic, and context sequences shown in Tables 1-2, and can encode a polypeptide that varies to some degree from the specific polypeptide sequences shown in Table 1.

[0131] To determine the percent identity of two amino acid sequences or two nucleotide sequences of two molecules that share sequence homology, the sequences are aligned for optimal comparison purposes (e.g., gaps can be introduced in one or both of a first and a second amino acid or nucleic acid sequence for optimal alignment and non-homologous sequences can be disregarded for comparison purposes). In a preferred embodiment, at least 30%, 40%, 50%, 60%, 70%, 80%, or 90% or more of the length of a reference sequence is aligned for comparison purposes. The amino acid residues or nucleotides at corresponding amino acid positions or nucleotide positions are then compared. When a position in the first sequence is occupied by the same amino acid residue or nucleotide as the corresponding position in the second sequence, then the molecules are identical at that position (as used herein, amino acid or nucleic acid “identity” is equivalent to amino acid or nucleic acid “homology”). The percent identity between the two sequences is a function of the number of identical positions shared by the sequences, taking into account the number of gaps, and the length of each gap, which need to be introduced for optimal alignment of the two sequences.

[0132] The comparison of sequences and determination of percent identity between two sequences can be accomplished using a mathematical algorithm. (Computational Molecular Biology, Lesk, A. M., ed., Oxford University Press, New York, 1988; Biocomputing: Informatics and Genome Projects, Smith, D. W., ed., Academic Press, New York, 1993; Computer Analysis of Sequence Data, Part 1, Griffin, A. M., and Griffin, H. G., eds., Humana Press, New Jersey, 1994; Sequence Analysis in Molecular Biology, von Heinje, G., Academic Press, 1987; and Sequence Analysis Primer, Gribskov, M. and Devereux, J., eds., M Stockton Press, New York, 1991). In a preferred embodiment, the percent identity between two amino acid sequences is determined using the Needleman and Wunsch algorithm (J. Mol. Biol. (48):444-453 (1970)) which has been incorporated into the GAP program in the GCG software package, using either a Blossom 62 matrix or a PAM250 matrix, and a gap weight of 16, 14, 12, 10, 8, 6, or 4 and a length weight of 1, 2, 3, 4, 5, or 6.

[0133] In yet another preferred embodiment, the percent identity between two nucleotide sequences is determined using the GAP program in the GCG software package (Devereux, J., et al., Nucleic Acids Res. 12(1):387 (1984)), using a NWSgapdna.CMP matrix and a gap weight of 40, 50, 60, 70, or 80 and a length weight of 1, 2, 3, 4, 5, or 6. In another embodiment, the percent identity between two amino acid or nucleotide sequences is determined using the algorithm of E. Myers and W. Miller (CABIOS, 4:11-17 (1989)) which has been incorporated into the ALIGN program (version 2.0), using a PAM120 weight residue table, a gap length penalty of 12, and a gap penalty of 4.

[0134] The nucleotide and amino acid sequences of the present invention can further be used as a “query sequence” to perform a search against sequence databases to, for example, identify other family members or related sequences. Such searches can be performed using the NBLAST and kBLAST programs (version 2.0) of Altschul, et al. (J. Mol. Biol. 215:403-10 (1990)). BLAST nucleotide searches can be performed with the NBLAST program, score=100, wordlength=12 to obtain nucleotide sequences homologous to the nucleic acid molecules of the invention. BLAST protein searches can be performed with the XBLAST program, score=50, wordlength=3 to obtain amino acid sequences homologous to the proteins of the invention. To obtain gapped alignments for comparison purposes, Gapped BLAST can be utilized as described in Altschul et al. (Nucleic Acids Res. 25(17):3389-3402 (1997)). When utilizing BLAST and gapped BLAST programs, the default parameters of the respective programs (e.g., XBLAST and NBLAST) can be used. In addition to BLAST, examples of other search and sequence comparison programs used in the art include, but are not limited to, FASTA (Pearson, Methods Mol. Biol. 25, 365-389 (1994)) and KERR (Dufresne et al., Nat Biotechnol December 2002;20(12):1269-71). For further information regarding bioinformatics techniques, see Current Protocols in Bioinformatics, John Wiley & Sons, Inc., N.Y.

[0135] The present invention further provides non-coding fragments of the nucleic acid molecules disclosed in Table 1 and/or Table 2. Preferred non-coding fragments include, but are not limited to, promoter sequences, enhancer sequences, intronic sequences, 5′ untranslated regions (UTRs), 3′ untranslated regions, gene modulating sequences and gene termination sequences. Such fragments are useful, for example, in controlling heterologous gene expression and in developing screens to identify gene-modulating agents.

[0136] SNP Detection Reagents

[0137] In a specific aspect of the present invention, the SNPs disclosed in Table 1 and/or Table 2, and their associated transcript sequences (provided in Table 1 as SEQ ID NOS:1-126), genomic sequences (provided in Table 2 as SEQ ID NOS:1585-1662), and context sequences (transcript-based context sequences are provided in Table 1 as SEQ ID NOS:253-1584; genomic-based context sequences are provided in Table 2 as SEQ ID NOS:1663-17,275), can be used for the design of SNP detection reagents. As used herein, a “SNP detection reagent” is a reagent that specifically detects a specific target SNP position disclosed herein, and that is preferably specific for a particular nucleotide (allele) of the target SNP position (i.e., the detection reagent preferably can differentiate between different alternative nucleotides at a target SNP position, thereby allowing the identity of the nucleotide present at the target SNP position to be determined). Typically, such detection reagent hybridizes to a target SNP-containing nucleic acid molecule by complementary base-pairing in a sequence specific manner, and discriminates the target variant sequence from other nucleic acid sequences such as an art-known form in a test sample. An example of a detection reagent is a probe that hybridizes to a target nucleic acid containing one or more of the SNPs provided in Table 1 and/or Table 2. In a preferred embodiment, such a probe can differentiate between nucleic acids having a particular nucleotide (allele) at a target SNP position from other nucleic acids that have a different nucleotide at the same target SNP position. In addition, a detection reagent may hybridize to a specific region 5′ and/or 3′ to a SNP position, particularly a region corresponding to the context sequences provided in Table 1 and/or Table 2 (transcript-based context sequences are provided in Table 1 as SEQ ID NOS:253-1584; genomic-based context sequences are provided in Table 2 as SEQ ID NOS:1663-17,275). Another example of a detection reagent is a primer that acts as an initiation point of nucleotide extension along a complementary strand of a target polynucleotide. The SNP sequence information provided herein is also useful for designing primers, e.g. allele-specific primers, to amplify (e.g., using PCR) any SNP of the present invention.

[0138] In one preferred embodiment of the invention, a SNP detection reagent is an isolated or synthetic DNA or RNA polynucleotide probe or primer or PNA oligomer, or a combination of DNA, RNA and/or PNA, that hybridizes to a segment of a target nucleic acid molecule containing a SNP identified in Table 1 and/or Table 2. A detection reagent in the form of a polynucleotide may optionally contain modified base analogs, intercalators or minor groove binders. Multiple detection reagents such as probes may be, for example, affixed to a solid support (e.g., arrays or beads) or supplied in solution (e.g., probe/primer sets for enzymatic reactions such as PCR, RT-PCR, TaqMan assays, or primer-extension reactions) to form a SNP detection kit.

[0139] A probe or primer typically is a substantially purified oligonucleotide or PNA oligomer. Such oligonucleotide typically comprises a region of complementary nucleotide sequence that hybridizes under stringent conditions to at least about 8, 10, 12, 16, 18, 20, 22, 25, 30, 40, 50, 55, 60, 65, 70, 80, 90, 100, 120 (or any other number in-between) or more consecutive nucleotides in a target nucleic acid molecule. Depending on the particular assay, the consecutive nucleotides can either include the target SNP position, or be a specific region in close enough proximity 5′ and/or 3′ to the SNP position to carry out the desired assay.

[0140] Other preferred primer and probe sequences can readily be determined using the transcript sequences (SEQ ID NOS:1-126), genomic sequences (SEQ ID NOS:1585-1662), and SNP context sequences (transcript-based context sequences are provided in Table 1 as SEQ ID NOS:253-1584; genomic-based context sequences are provided in Table 2 as SEQ ID NOS:1663-17,275) disclosed in the Sequence Listing and in Tables 1-2. It will be apparent to one of skill in the art that such primers and probes are directly useful as reagents for genotyping the SNPs of the present invention, and can be incorporated into any kit/system format.

[0141] In order to produce a probe or primer specific for a target SNP-containing sequence, the gene/transcript and/or context sequence surrounding the SNP of interest is typically examined using a computer algorithm that starts at the 5′ or at the 3′ end of the nucleotide sequence. Typical algorithms will then identify oligomers of defined length that are unique to the gene/SNP context sequence, have a GC content within a range suitable for hybridization, lack predicted secondary structure that may interfere with hybridization, and/or possess other desired characteristics or that lack other undesired characteristics.

[0142] A primer or probe of the present invention is typically at least about 8 nucleotides in length. In one embodiment of the invention, a primer or a probe is at least about 10 nucleotides in length. In a preferred embodiment, a primer or a probe is at least about 12 nucleotides in length. In a more preferred embodiment, a primer or probe is at least about 16, 17, 18, 19, 20, 21, 22, 23, 24 or 25 nucleotides in length. While the maximal length of a probe can be as long as the target sequence to be detected, depending on the type of assay in which it is employed, it is typically less than about 50, 60, 65, or 70 nucleotides in length. In the case of a primer, it is typically less than about 30 nucleotides in length. In a specific preferred embodiment of the invention, a primer or a probe is within the length of about 18 and about 28 nucleotides. However, in other embodiments, such as nucleic acid arrays and other embodiments in which probes are affixed to a substrate, the probes can be longer, such as on the order of 30-70, 75, 80, 90, 100, or more nucleotides in length (see the section below entitled “SNP Detection Kits and Systems”).

[0143] For analyzing SNPS, it may be appropriate to use oligonucleotides specific for alternative SNP alleles. Such oligonucleotides that detect single nucleotide variations in target sequences may be referred to by such terms as “allele-specific oligonucleotides”, “allele-specific probes”, or “allele-specific primers”. The design and use of allele-specific probes for analyzing polymorphisms is described in, e.g., Mutation Detection A Practical Approach, ed. Cotton et al. Oxford University Press, 1998; Saiki et al., Nature 324, 163-166 (1986); Dattagupta, EP235,726; and Saiki, WO 89/11548.

[0144] While the design of each allele-specific primer or probe depends on variables such as the precise composition of the nucleotide sequences flanking a SNP position in a target nucleic acid molecule, and the length of the primer or probe, another factor in the use of primers and probes is the stringency of the condition under which the hybridization between the probe or primer and the target sequence is performed. Higher stringency conditions utilize buffers with lower ionic strength and/or a higher reaction temperature, and tend to require a more perfect match between probe/primer and a target sequence in order to form a stable duplex. If the stringency is too high, however, hybridization may not occur at all. In contrast, lower stringency conditions utilize buffers with higher ionic strength and/or a lower reaction temperature, and permit the formation of stable duplexes with more mismatched bases between a probe/primer and a target sequence. By way of example and not limitation, exemplary conditions for high stringency hybridization conditions using an allele-specific probe are as follows: prehybridization with a solution containing 5× standard saline phosphate EDTA (SSPE), 0.5% NaDodSO₄ (SDS) at 55° C., and incubating probe with target nucleic acid molecules in the same solution at the same temperature, followed by washing with a solution containing 2× SSPE, and 0.1% SDS at 55° C. or room temperature.

[0145] Moderate stringency hybridization conditions may be used for allele-specific primer extension reactions with a solution containing, e.g., about 50 mM KCl at about 46° C. Alternatively, the reaction may be carried out at an elevated temperature such as 60° C. In another embodiment, a moderately stringent hybridization condition suitable for oligonucleotide ligation assay (OLA) reactions wherein two probes are ligated if they are completely complementary to the target sequence may utilize a solution of about 100 mM KCl at a temperature of 46° C.

[0146] In a hybridization-based assay, allele-specific probes can be designed that hybridize to a segment of target DNA from one individual but do not hybridize to the corresponding segment from another individual due to the presence of different polymorphic forms (e.g., alternative SNP alleles/nucleotides) in the respective DNA segments from the two individuals. Hybridization conditions should be sufficiently stringent that there is a significant detectable difference in hybridization intensity between alleles, and preferably an essentially binary response, whereby a probe hybridizes to only one of the alleles or significantly more strongly to one allele. While a probe may be designed to hybridize to a target sequence that contains a SNP site such that the SNP site aligns anywhere along the sequence of the probe, the probe is preferably designed to hybridize to a segment of the target sequence such that the SNP site aligns with a central position of the probe (e.g., a position within the probe that is at least three nucleotides from either end of the probe). This design of probe generally achieves good discrimination in hybridization between different allelic forms.

[0147] In another embodiment, a probe or primer may be designed to hybridize to a segment of target DNA such that the SNP aligns with either the 5′ most end or the 3′ most end of the probe or primer. In a specific preferred embodiment that is particularly suitable for use in a oligonucleotide ligation assay (U.S. Pat. No. 4,988,617), the 3′ most nucleotide of the probe aligns with the SNP position in the target sequence.

[0148] Oligonucleotide probes and primers may be prepared by methods well known in the art. Chemical synthetic methods include, but are limited to, the phosphotriester method described by Narang et al., 1979, Methods in Enzymology 68:90; the phosphodiester method described by Brown et al., 1979, Methods in Enzymology 68:109, the diethylphosphoamidate method described by Beaucage et al., 1981, Tetrahedron Letters 22:1859; and the solid support method described in U.S. Pat. No. 4,458,066.

[0149] Allele-specific probes are often used in pairs (or, less commonly, in sets of 3 or 4, such as if a SNP position is known to have 3 or 4 alleles, respectively, or to assay both strands of a nucleic acid molecule for a target SNP allele), and such pairs may be identical except for a one nucleotide mismatch that represents the allelic variants at the SNP position. Commonly, one member of a pair perfectly matches a reference form of a target sequence that has a more common SNP allele (i.e., the allele that is more frequent in the target population) and the other member of the pair perfectly matches a form of the target sequence that has a less common SNP allele (i.e., the allele that is rarer in the target population). In the case of an array, multiple pairs of probes can be immobilized on the same support for simultaneous analysis of multiple different polymorphisms.

[0150] In one type of PCR-based assay, an allele-specific primer hybridizes to a region on a target nucleic acid molecule that overlaps a SNP position and only primes amplification of an allelic form to which the primer exhibits perfect complementarity (Gibbs, 1989, Nucleic Acid Res. 17 2427-2448). Typically, the primer's 3′-most nucleotide is aligned with and complementary to the SNP position of the target nucleic acid molecule. This primer is used in conjunction with a second primer that hybridizes at a distal site. Amplification proceeds from the two primers, producing a detectable product that indicates which allelic form is present in the test sample. A control is usually performed with a second pair of primers, one of which shows a single base mismatch at the polymorphic site and the other of which exhibits perfect complementarity to a distal site. The single-base mismatch prevents amplification or substantially reduces amplification efficiency, so that either no detectable product is formed or it is formed in lower amounts or at a slower pace. The method generally works most effectively when the mismatch is at the 3′-most position of the oligonucleotide (i.e., the 3′-most position of the oligonucleotide aligns with the target SNP position) because this position is most destabilizing to elongation from the primer (see, e.g., WO 93/22456). This PCR-based assay can be utilized as part of the TaqMan assay, described below.

[0151] In a specific embodiment of the invention, a primer of the invention contains a sequence substantially complementary to a segment of a target SNP-containing nucleic acid molecule except that the primer has a mismatched nucleotide in one of the three nucleotide positions at the 3′-most end of the primer, such that the mismatched nucleotide does not base pair with a particular allele at the SNP site. In a preferred embodiment, the mismatched nucleotide in the primer is the second from the last nucleotide at the 3′-most position of the primer. In a more preferred embodiment, the mismatched nucleotide in the primer is the last nucleotide at the 3 ′-most position of the primer.

[0152] In another embodiment of the invention, a SNP detection reagent of the invention is labeled with a fluorogenic reporter dye that emits a detectable signal. While the preferred reporter dye is a fluorescent dye, any reporter dye that can be attached to a detection reagent such as an oligonucleotide probe or primer is suitable for use in the invention. Such dyes include, but are not limited to, Acridine, AMCA, BODIPY, Cascade Blue, Cy2, Cy3, Cy5, Cy7, Dabcyl, Edans, Eosin, Erythrosin, Fluorescein, 6-Fam, Tet, Joe, Hex, Oregon Green, Rhodamine, Rhodol Green, Tamra, Rox, and Texas Red.

[0153] In yet another embodiment of the invention, the detection reagent may be further labeled with a quencher dye such as Tamra, especially when the reagent is used as a self-quenching probe such as a TaqMan (U.S. Pat. Nos. 5,210,015 and 5,538,848) or Molecular Beacon probe (U.S. Pat. Nos. 5,118,801 and 5,312,728), or other stemless or linear beacon probe (Livak et al., 1995, PCR Method Appl. 4:357-362; Tyagi et al., 1996, Nature Biotechnology 14: 303-308; Nazarenko et al., 1997, Nucl. Acids Res. 25:2516-2521; U.S. Pat. Nos. 5,866,336 and 6,117,635).

[0154] The detection reagents of the invention may also contain other labels, including but not limited to, biotin for streptavidin binding, hapten for antibody binding, and oligonucleotide for binding to another complementary oligonucleotide such as pairs of zipcodes.

[0155] The present invention also contemplates reagents that do not contain (or that are complementary to) a SNP nucleotide identified herein but that are used to assay one or more SNPs disclosed herein. For example, primers that flank, but do not hybridize directly to a target SNP position provided herein are useful in primer extension reactions in which the primers hybridize to a region adjacent to the target SNP position (i.e., within one or more nucleotides from the target SNP site). During the primer extension reaction, a primer is typically not able to extend past a target SNP site if a particular nucleotide (allele) is present at that target SNP site, and the primer extension product can be detected in order to determine which SNP allele is present at the target SNP site. For example, particular ddNTPs are typically used in the primer extension reaction to terminate primer extension once a ddNTP is incorporated into the extension product (a primer extension product which includes a ddNTP at the 3′-most end of the primer extension product, and in which the ddNTP is a nucleotide of a SNP disclosed herein, is a composition that is specifically contemplated by the present invention). Thus, reagents that bind to a nucleic acid molecule in a region adjacent to a SNP site and that are used for assaying the SNP site, even though the bound sequences do not necessarily include the SNP site itself, are also contemplated by the present invention.

[0156] SNP Detection Kits and Systems

[0157] A person skilled in the art will recognize that, based on the SNP and associated sequence information disclosed herein, detection reagents can be developed and used to assay any SNP of the present invention individually or in combination, and such detection reagents can be readily incorporated into one of the established kit or system formats which are well known in the art. The terms “kits” and “systems”, as used herein in the context of SNP detection reagents, are intended to refer to such things as combinations of multiple SNP detection reagents, or one or more SNP detection reagents in combination with one or more other types of elements or components (e.g., other types of biochemical reagents, containers, packages such as packaging intended for commercial sale, substrates to which SNP detection reagents are attached, electronic hardware components, etc.). Accordingly, the present invention further provides SNP detection kits and systems, including but not limited to, packaged probe and primer sets (e.g., TaqMan probe/primer sets), arrays/microarrays of nucleic acid molecules, and beads that contain one or more probes, primers, or other detection reagents for detecting one or more SNPs of the present invention. The kits/systems can optionally include various electronic hardware components; for example, arrays (“DNA chips”) and microfluidic systems (“lab-on-a-chip” systems) provided by various manufacturers typically comprise hardware components. Other kits/systems (e.g., probe/primer sets) may not include electronic hardware components, but may be comprised of, for example, one or more SNP detection reagents (along with, optionally, other biochemical reagents) packaged in one or more containers.

[0158] In some embodiments, a SNP detection kit typically contains one or more detection reagents and other components (e.g., a buffer, enzymes such as DNA polymerases or ligases, chain extension nucleotides such as deoxynucleotide triphosphates, and in the case of Sanger-type DNA sequencing reactions, chain terminating nucleotides, positive control sequences, negative control sequences, and the like) necessary to carry out an assay or reaction, such as amplification and/or detection of a SNP-containing nucleic acid molecule. A kit may further contain means for determining the amount of a target nucleic acid, and means for comparing the amount with a standard, and can comprise instructions for using the kit to detect the SNP-containing nucleic acid molecule of interest. In one embodiment of the present invention, kits are provided which contain the necessary reagents to carry out one or more assays to detect one or more SNPs disclosed herein. In a preferred embodiment of the present invention, SNP detection kits/systems are in the form of nucleic acid arrays, or compartmentalized kits, including microfluidic/lab-on-a-chip systems.

[0159] SNP detection kits/systems may contain, for example, one or more probes, or pairs of probes, that hybridize to a nucleic acid molecule at or near each target SNP position. Multiple pairs of allele-specific probes may be included in the kit/system to simultaneously assay large numbers of SNPs, at least one of which is a SNP of the present invention. In some kits/systems, the allele-specific probes are immobilized to a substrate such as an array or bead. For example, the same substrate can comprise allele-specific probes for detecting at least 1; 10; 100; 1000; 10,000; 100,000 (or any other number in-between) or substantially all of the SNPs shown in Table 1 and/or Table 2.

[0160] The terms “arrays”, “microarrays”, and “DNA chips” are used herein interchangeably to refer to an array of distinct polynucleotides affixed to a substrate, such as glass, plastic, paper, nylon or other type of membrane, filter, chip, or any other suitable solid support. The polynucleotides can be synthesized directly on the substrate, or synthesized separate from the substrate and then affixed to the substrate. In one embodiment, the microarray is prepared and used according to the methods described in U.S. Pat. No. 5,837,832, Chee et al., PCT application W095/11995 (Chee et al.), Lockhart, D. J. et al. (1996; Nat. Biotech. 14: 1675-1680) and Schena, M. et al. (1996; Proc. Natl. Acad. Sci. 93: 10614-10619), all of which are incorporated herein in their entirety by reference. In other embodiments, such arrays are produced by the methods described by Brown et al., U.S. Pat. No. 5,807,522.

[0161] Nucleic acid arrays are reviewed in the following references: Zammatteo et al., “New chips for molecular biology and diagnostics”, Biotechnol Annu Rev. 2002;8:85-101; Sosnowski et al., “Active microelectronic array system for DNA hybridization, genotyping and pharmacogenomic applications”, Psychiatr Genet. December 2002;12(4):181-92; Heller, “DNA microarray technology: devices, systems, and applications”, Annu Rev Biomed Eng. 2002;4:129-53. Epub Mar. 22, 2002; Kolchinsky et al., “Analysis of SNPs and other genomic variations using gel-based chips”, Hum Mutat. April 2002;19(4):343-60; and McGall et al., “High-density genechip oligonucleotide probe arrays”, Adv Biochem Eng Biotechnol. 2002;77:21-42.

[0162] Any number of probes, such as allele-specific probes, may be implemented in an array, and each probe or pair of probes can hybridize to a different SNP position. In the case of polynucleotide probes, they can be synthesized at designated areas (or synthesized separately and then affixed to designated areas) on a substrate using a light-directed chemical process. Each DNA chip can contain, for example, thousands to millions of individual synthetic polynucleotide probes arranged in a grid-like pattern and miniaturized (e.g., to the size of a dime). Preferably, probes are attached to a solid. support in an ordered, addressable array.

[0163] A microarray can be composed of a large number of unique, single-stranded polynucleotides, usually either synthetic antisense polynucleotides or fragments of cDNAs, fixed to a solid support. Typical polynucleotides are preferably about 6-60 nucleotides in length, more preferably about 15-30 nucleotides in length, and most preferably about 18-25 nucleotides in length. For certain types of microarrays or other detection kits/systems, it may be preferable to use oligonucleotides that are only about 7-20 nucleotides in length. In other types of arrays, such as arrays used in conjunction with chemiluminescent detection technology, preferred probe lengths can be, for example, about 15-80 nucleotides in length, preferably about 50-70 nucleotides in length, more preferably about 55-65 nucleotides in length, and most preferably about 60 nucleotides in length. The microarray or detection kit can contain polynucleotides that cover the known 5′ or 3′ sequence of a gene/transcript or target SNP site, sequential polynucleotides that cover the full-length sequence of a gene/transcript; or unique polynucleotides selected from particular areas along the length of a target gene/transcript sequence, particularly areas corresponding to one or more SNPs disclosed in Table 1 and/or Table 2. Polynucleotides used in the microarray or detection kit can be specific to a SNP or SNPs of interest (e.g., specific to a particular SNP allele at a target SNP site, or specific to particular SNP alleles at multiple different SNP sites), or specific to a polymorphic gene/transcript or genes/transcripts of interest.

[0164] Hybridization assays based on polynucleotide arrays rely on the differences in hybridization stability of the probes to perfectly matched and mismatched target sequence variants. For SNP genotyping, it is generally preferable that stringency conditions used in hybridization assays are high enough such that nucleic acid molecules that differ from one another at as little as a single SNP position can be differentiated (e.g., typical SNP hybridization assays are designed so that hybridization will occur only if one particular nucleotide is present at a SNP position, but will not occur if an alternative nucleotide is present at that SNP position). Such high stringency conditions may be preferable when using, for example, nucleic acid arrays of allele-specific probes for SNP detection. Such high stringency conditions are described in the preceding section, and are well known to those skilled in the art and can be found in, for example, Current Protocols in Molecular Biology, John Wiley & Sons, N.Y. (1989), 6.3.1-6.3.6.

[0165] In other embodiments, the arrays are used in conjunction with chemiluminescent detection technology. The following patents and patent applications, which are all hereby incorporated by reference, provide additional information pertaining to chemiluminescent detection: U.S. patent application Ser. Nos. 10/620332 and 10/620333 describe chemiluminescent approaches for microarray detection; U.S. Pat. Nos. 6,124,478, 6,107,024, 5,994,073, 5,981,768, 5,871,938, 5,843,681, 5,800,999, and 5,773,628 describe methods and compositions of dioxetane for performing chemiluminescent detection; and U.S. published application US2002/0110828 discloses methods and compositions for microarray controls.

[0166] In one embodiment of the invention, a nucleic acid array can comprise an array of probes of about 15-25 nucleotides in length. In further embodiments, a nucleic acid array can comprise any number of probes, in which at least one probe is capable of detecting one or more SNPs disclosed in Table 1 and/or Table 2, and/or at least one probe comprises a fragment of one of the sequences selected from the group consisting of those disclosed in Table 1, Table 2, the Sequence Listing, and sequences complementary thereto, said fragment comprising at least about 8 consecutive nucleotides, preferably 10, 12, 15, 16, 18, 20, more preferably 22, 25, 30, 40, 47, 50, 55, 60, 65, 70, 80, 90, 100, or more consecutive nucleotides (or any other number in-between) and containing (or being complementary to) a novel SNP allele disclosed in Table 1 and/or Table 2. In some embodiments, the nucleotide complementary to the SNP site is within 5, 4, 3, 2, or 1 nucleotide from the center of the probe, more preferably at the center of said probe.

[0167] A polynucleotide probe can be synthesized on the surface of the substrate by using a chemical coupling procedure and an ink jet application apparatus, as described in PCT application W095/251116 (Baldeschweiler et al.) which is incorporated herein in its entirety by reference. In another aspect, a “gridded” array analogous to a dot (or slot) blot may be used to arrange and link cDNA fragments or oligonucleotides to the surface of a substrate using a vacuum system, thermal, UV, mechanical or chemical bonding procedures. An array, such as those described above, may be produced by hand or by using available devices (slot blot or dot blot apparatus), materials (any suitable solid support), and machines (including robotic instruments), and may contain 8, 24, 96, 384, 1536, 6144 or more polynucleotides, or any other number which lends itself to the efficient use of commercially available instrumentation.

[0168] Using such arrays or other kits/systems, the present invention provides methods of identifying the SNPs disclosed herein in a test sample. Such methods typically involve incubating a test sample of nucleic acids with an array comprising one or more probes corresponding to at least one SNP position of the present invention, and assaying for binding of a nucleic acid from the test sample with one or more of the probes. Conditions for incubating a SNP detection reagent (or a kit/system that employs one or more such SNP detection reagents) with a test sample vary. Incubation conditions depend on such factors as the format employed in the assay, the detection methods employed, and the type and nature of the detection reagents used in the assay. One skilled in the art will recognize that any one of the commonly available hybridization, amplification and array assay formats can readily be adapted to detect the SNPs disclosed herein.

[0169] A SNP detection kit/system of the present invention may include components that are used to prepare nucleic acids from a test sample for the subsequent amplification and/or detection of a SNP-containing nucleic acid molecule. Such sample preparation components can be used to produce nucleic acid extracts (including DNA and/or RNA), proteins or membrane extracts from any bodily fluids (such as blood, serum, plasma, urine, saliva, phlegm, gastric juices, semen, tears, sweat, etc.), skin, hair, cells (especially nucleated cells), biopsies, buccal swabs or tissue specimens. The test samples used in the above-described methods will vary based on such factors as the assay format, nature of the detection method, and the specific tissues, cells or extracts used as the test sample to be assayed. Methods of preparing nucleic acids, proteins, and cell extracts are well known in the art and can be readily adapted to obtain a sample that is compatible with the system utilized. Automated sample preparation systems for extracting nucleic acids from a test sample are commercially available, and examples are Qiagen's BioRobot 9600, Applied Biosystems' PRISM™ 6700 sample preparation system, and Roche Molecular Systems' COBAS AmpliPrep System.

[0170] Another form of kit contemplated by the present invention is a compartmentalized kit. A compartmentalized kit includes any kit in which reagents are contained in separate containers. Such containers include, for example, small glass containers, plastic containers, strips of plastic, glass or paper, or arraying material such as silica. Such containers allow one to efficiently transfer reagents from one compartment to another compartment such that the test samples and reagents are not cross-contaminated, or from one container to another vessel not included in the kit, and the agents or solutions of each container can be added in a quantitative fashion from one compartment to another or to another vessel. Such containers may include, for example, one or more containers which will accept the test sample, one or more containers which contain at least one probe or other SNP detection reagent for detecting one or more SNPs of the present invention, one or more containers which contain wash reagents (such as phosphate buffered saline, Tris-buffers, etc.), and one or more containers which contain the reagents used to reveal the presence of the bound probe or other SNP detection reagents. The kit can optionally further comprise compartments and/or reagents for, for example, nucleic acid amplification or other enzymatic reactions such as primer extension reactions, hybridization, ligation, electrophoresis (preferably capillary electrophoresis), mass spectrometry, and/or laser-induced fluorescent detection. The kit may also include instructions for using the kit. Exemplary compartmentalized kits include microfluidic devices known in the art (see, e.g., Weigl et al., “Lab-on-a-chip for drug development”, Adv Drug Deliv Rev. Feb. 24, 2003 ;55(3):349-77). In such microfluidic devices, the containers may be referred to as, for example, microfluidic “compartments”, “chambers”, or “channels”.

[0171] Microfluidic devices, which may also be referred to as “lab-on-a-chip” systems, biomedical micro-electro-mechanical systems (bioMEMs), or multicomponent integrated systems, are exemplary kits/systems of the present invention for analyzing SNPs. Such systems miniaturize and compartmentalize processes such as probe/target hybridization, nucleic acid amplification, and capillary electrophoresis reactions in a single functional device. Such microfluidic devices typically utilize detection reagents in at least one aspect of the system, and such detection reagents may be used to detect one or more SNPs of the present invention. One example of a microfluidic system is disclosed in U.S. Pat. No. 5,589,136, which describes the integration of PCR amplification and capillary electrophoresis in chips. Exemplary microfluidic systems comprise a pattern of microchannels designed onto a glass, silicon, quartz, or plastic wafer included on a microchip. The movements of the samples may be controlled by electric, electroosmotic or hydrostatic forces applied across different areas of the microchip to create functional microscopic valves and pumps with no moving parts. Varying the voltage can be used as a means to control the liquid flow at intersections between the micro-machined channels and to change the liquid flow rate for pumping across different sections of the microchip.

[0172] See, for example, U.S. Pat. Nos. 6,153,073, Dubrow et al., and 6,156,181, Parce et al.

[0173] For genotyping SNPs, an exemplary microfluidic system may integrate, for example, nucleic acid amplification, primer extension, capillary electrophoresis, and a detection method such as laser induced fluorescence detection. In a first step of an exemplary process for using such an exemplary system, nucleic acid samples are amplified, preferably by PCR. Then, the amplification products are subjected to automated primer extension reactions using ddNTPs (specific fluorescence for each ddNTP) and the appropriate oligonucleotide primers to carry out primer extension reactions which hybridize just upstream of the targeted SNP. Once the extension at the 3′ end is completed, the primers are separated from the unincorporated fluorescent ddNTPs by capillary electrophoresis. The separation medium used in capillary electrophoresis can be, for example, polyacrylamide, polyethyleneglycol or dextran. The incorporated ddNTPs in the single nucleotide primer extension products are identified by laser-induced fluorescence detection. Such an exemplary microchip can be used to process, for example, at least 96 to 384 samples, or more, in parallel.

[0174] Uses of Nucleic Acid Molecules

[0175] The nucleic acid molecules of the present invention have a variety of uses, especially in the diagnosis and treatment of CHD, and in particular MI. For example, the nucleic acid molecules are useful as hybridization probes, such as for genotyping SNPs in messenger RNA, transcript, cDNA, genomic DNA, amplified DNA or other nucleic acid molecules, and for isolating full-length cDNA and genomic clones encoding the variant peptides disclosed in Table 1 as well as their orthologs.

[0176] A probe can hybridize to any nucleotide sequence along the entire length of a nucleic acid molecule provided in Table 1 and/or Table 2. Preferably, a probe of the present invention hybridizes to a region of a target sequence that encompasses a SNP position indicated in Table 1 and/or Table 2. More preferably, a probe hybridizes to a SNP-containing target sequence in a sequence-specific manner such that it distinguishes the target sequence from other nucleotide sequences which vary from the target sequence only by which nucleotide is present at the SNP site. Such a probe is particularly useful for detecting the presence of a SNP-containing nucleic acid in a test sample, or for determining which nucleotide (allele) is present at a particular SNP site (i.e., genotyping the SNP site).

[0177] A nucleic acid hybridization probe may be used for determining the presence, level, form, and/or distribution of nucleic acid expression. The nucleic acid whose level is determined can be DNA or RNA. Accordingly, probes specific for the SNPs described herein can be used to assess the presence, expression and/or gene copy number in a given cell, tissue, or organism. These uses are relevant for diagnosis of disorders involving an increase or decrease in gene expression relative to normal levels. In vitro techniques for detection of mRNA include, for example, Northern blot hybridizations and in situ hybridizations. In vitro techniques for detecting DNA include Southern blot hybridizations and in situ hybridizations (Sambrook and Russell, 2000, Molecular Cloning: A Laboratory Manual, Cold Spring Harbor Press, Cold Spring Harbor, N.Y.).

[0178] Probes can be used as part of a diagnostic test kit for identifying cells or tissues in which a variant protein is expressed, such as by measuring the level of a variant protein-encoding nucleic acid (e.g., mRNA) in a sample of cells from a subject or determining if a polynucleotide contains a SNP of interest.

[0179] Thus, the nucleic acid molecules of the invention can be used as hybridization probes to detect the SNPs disclosed herein, thereby determining whether an individual with the polymorphisms is at risk for MI or has developed early stage MI. Detection of a SNP associated with a disease phenotype provides a diagnostic tool for an active disease and/or genetic predisposition to the disease.

[0180] Furthermore, the nucleic acid molecules of the invention are therefore useful for detecting a gene (gene information is disclosed in Table 2, for example) which contains a SNP disclosed herein and/or products of such genes, such as expressed mRNA transcript molecules (transcript information is disclosed in Table 1, for example), and are thus useful for detecting gene expression. The nucleic acid molecules can optionally be implemented in, for example, an array or kit format for use in detecting gene expression.

[0181] The nucleic acid molecules of the invention are also useful as primers to amplify any given region of a nucleic acid molecule, particularly a region containing a SNP identified in Table 1 and/or Table 2.

[0182] The nucleic acid molecules of the invention are also useful for constructing recombinant vectors (described in greater detail below). Such vectors include expression vectors that express a portion of, or all of, any of the variant peptide sequences provided in Table 1. Vectors also include insertion vectors, used to integrate into another nucleic acid molecule sequence, such as into the cellular genome, to alter in situ expression of a gene and/or gene product. For example, an endogenous coding sequence can be replaced via homologous recombination with all or part of the coding region containing one or more specifically introduced SNPs.

[0183] The nucleic acid molecules of the invention are also useful for expressing antigenic portions of the variant proteins, particularly antigenic portions that contain a variant amino acid sequence (e.g., an amino acid substitution) caused by a SNP disclosed in Table 1 and/or Table 2.

[0184] The nucleic acid molecules of the invention are also useful for constructing vectors containing a gene regulatory region of the nucleic acid molecules of the present invention.

[0185] The nucleic acid molecules of the invention are also useful for designing ribozymes corresponding to all, or a part, of an mRNA molecule expressed from a SNP-containing nucleic acid molecule described herein.

[0186] The nucleic acid molecules of the invention are also useful for constructing host cells expressing a part, or all, of the nucleic acid molecules and variant peptides.

[0187] The nucleic acid molecules of the invention are also useful for constructing transgenic animals expressing all, or a part, of the nucleic acid molecules and variant peptides. The production of recombinant cells and transgenic animals having nucleic acid molecules which contain the SNPs disclosed in Table 1 and/or Table 2 allow, for example, effective clinical design of treatment compounds and dosage regimens.

[0188] The nucleic acid molecules of the invention are also useful in assays for drug screening to identify compounds that, for example, modulate nucleic acid expression.

[0189] The nucleic acid molecules of the invention are also useful in gene therapy in patients whose cells have aberrant gene expression. Thus, recombinant cells, which include a patient's cells that have been engineered ex vivo and returned to the patient, can be introduced into an individual where the recombinant cells produce the desired protein to treat the individual.

[0190] SNP Genotyping Methods

[0191] The process of determining which specific nucleotide (i.e., allele) is present at each of one or more SNP positions, such as a SNP position in a nucleic acid molecule disclosed in Table 1 and/or Table 2, is referred to as SNP genotyping. The present invention provides methods of SNP genotyping, such as for use in screening for CHD, and in particular MI, or related pathologies, or determining predisposition thereto, or determining responsiveness to a form of treatment, or in genome mapping or SNP association analysis, etc.

[0192] Nucleic acid samples can be genotyped to determine which allele(s) is/are present at any given genetic region (e.g., SNP position) of interest by methods well known in the art. The neighboring sequence can be used to design SNP detection reagents such as oligonucleotide probes, which may optionally be implemented in a kit format. Exemplary SNP genotyping methods are described in Chen et al., “Single nucleotide polymorphism genotyping: biochemistry, protocol, cost and throughput”, Pharmacogenomics J. 2003;3(2):77-96; Kwok et al., “Detection of single nucleotide polymorphisms”, Curr Issues Mol Biol. April 2003;5(2):43-60; Shi, “Technologies for individual genotyping: detection of genetic polymorphisms in drug targets and disease genes”, Am J Pharmacogenomics. 2002;2(3):197-205; and Kwok, “Methods for genotyping single nucleotide polymorphisms”, Annu Rev Genomics Hum Genet 2001 ;2:235-58. Exemplary techniques for high-throughput SNP genotyping are described in Marnellos, “High-throughput SNP analysis for genetic association studies”, Curr Opin Drug Discov Devel. May 2003;6(3):317-21. Common SNP genotyping methods include, but are not limited to, TaqMan assays, molecular beacon assays, nucleic acid arrays, allele-specific primer extension, allele-specific PCR, arrayed primer extension, homogeneous primer extension assays, primer extension with detection by mass spectrometry, pyrosequencing, multiplex primer extension sorted on genetic arrays, ligation with rolling circle amplification, homogeneous ligation, OLA (U.S. Pat. No. 4,988,167), multiplex ligation reaction sorted on genetic arrays, restriction-fragment length polymorphism, single base extension-tag assays, and the Invader assay. Such methods may be used in combination with detection mechanisms such as, for example, luminescence or chemiluminescence detection, fluorescence detection, time-resolved fluorescence detection, fluorescence resonance energy transfer, fluorescence polarization, mass spectrometry, and electrical detection.

[0193] Various methods for detecting polymorphisms include, but are not limited to, methods in which protection from cleavage agents is used to detect mismatched bases in RNA/RNA or RNA/DNA duplexes (Myers et al., Science 230:1242 (1985); Cotton et al., PNAS 85:4397 (1988); and Saleeba et al., Meth. Enzymol. 217:286-295 (1992)), comparison of the electrophoretic mobility of variant and wild type nucleic acid molecules (Orita et al., PNAS 86:2766 (1989); Cotton et al., Mutat. Res. 285:125-144 (1993); and Hayashi et al., Genet. Anal. Tech. Appl. 9:73-79 (1992)), and assaying the movement of polymorphic or wild-type fragments in polyacrylamide gels containing a gradient of denaturant using denaturing gradient gel electrophoresis (DGGE) (Myers et al., Nature 313:495 (1985)). Sequence variations at specific locations can also be assessed by nuclease protection assays such as RNase and S1 protection or chemical cleavage methods.

[0194] In a preferred embodiment, SNP genotyping is performed using the TaqMan assay, which is also known as the 5′ nuclease assay (U.S. Pat. Nos. 5,210,015 and 5,538,848). The TaqMan assay detects the accumulation of a specific amplified product during PCR. The TaqMan assay utilizes an oligonucleotide probe labeled with a fluorescent reporter dye and a quencher dye. The reporter dye is excited by irradiation at an appropriate wavelength, it transfers energy to the quencher dye in the same probe via a process called fluorescence resonance energy transfer (FRET). When attached to the probe, the excited reporter dye does not emit a signal. The proximity of the quencher dye to the reporter dye in the intact probe maintains a reduced fluorescence for the reporter. The reporter dye and quencher dye may be at the 5′ most and the 3′ most ends, respectively, or vice versa. Alternatively, the reporter dye may be at the 5′ or 3′ most end while the quencher dye is attached to an internal nucleotide, or vice versa. In yet another embodiment, both the reporter and the quencher may be attached to internal nucleotides at a distance from each other such that fluorescence of the reporter is reduced.

[0195] During PCR, the 5′ nuclease activity of DNA polymerase cleaves the probe, thereby separating the reporter dye and the quencher dye and resulting in increased fluorescence of the reporter. Accumulation of PCR product is detected directly by monitoring the increase in fluorescence of the reporter dye. The DNA polymerase cleaves the probe between the reporter dye and the quencher dye only if the probe hybridizes to the target SNP-containing template which is amplified during PCR, and the probe is designed to hybridize to the target SNP site only if a particular SNP allele is present.

[0196] Preferred TaqMan primer and probe sequences can readily be determined using the SNP and associated nucleic acid sequence information provided herein. A number of computer programs, such as Primer Express (Applied Biosystems, Foster City, Calif.), can be used to rapidly obtain optimal primer/probe sets. It will be apparent to one of skill in the art that such primers and probes for detecting the SNPs of the present invention are useful in diagnostic assays for CHD, and in particular MI and related pathologies, and can be readily incorporated into a kit format. The present invention also includes modifications of the Taqman assay well known in the art such as the use of Molecular Beacon probes (U.S. Pat. Nos. 5,118,801 and 5,312,728) and other variant formats (U.S. Pat. Nos. 5,866,336 and 6,117,635).

[0197] Another preferred method for genotyping the SNPs of the present invention is the use of two oligonucleotide probes in an OLA (see, e.g., U.S. Pat. No. 4,988,617). In this method, one probe hybridizes to a segment of a target nucleic acid with its 3′ most end aligned with the SNP site. A second probe hybridizes to an adjacent segment of the target nucleic acid molecule directly 3′ to the first probe. The two juxtaposed probes hybridize to the target nucleic acid molecule, and are ligated in the presence of a linking agent such as a ligase if there is perfect complementarity between the 3′ most nucleotide of the first probe with the SNP site. If there is a mismatch, ligation would not occur. After the reaction, the ligated probes are separated from the target nucleic acid molecule, and detected as indicators of the presence of a SNP.

[0198] The following patents, patent applications, and published international patent applications, which are all hereby incorporated by reference, provide additional information pertaining to techniques for carrying out various types of OLA: U.S. Pat. Nos. 6,027,889, 6,268,148, 5,494,810, 5,830,711, and 6,054,564 describe OLA strategies for performing SNP detection; WO 97/31256 and WO 00/56927 describe OLA strategies for performing SNP detection using universal arrays, wherein a zipcode sequence can be introduced into one of the hybridization probes, and the resulting product, or amplified product, hybridized to a universal zip code array; U.S. application Ser. Nos. 01/17329 (and 09/584,905) describes OLA (or LDR) followed by PCR, wherein zipcodes are incorporated into OLA probes, and amplified PCR products are determined by electrophoretic or universal zipcode array readout; U.S. applications Ser. No. 60/427818, 60/445636, and 60/445494 describe SNPlex methods and software for multiplexed SNP detection using OLA followed by PCR, wherein zipcodes are incorporated into OLA probes, and amplified PCR products are hybridized with a zipchute reagent, and the identity of the SNP determined from electrophoretic readout of the zipchute. In some embodiments, OLA is carried out prior to PCR (or another method of nucleic acid amplification). In other embodiments, PCR (or another method of nucleic acid amplification) is carried out prior to OLA.

[0199] Another method for SNP genotyping is based on mass spectrometry. Mass spectrometry takes advantage of the unique mass of each of the four nucleotides of DNA. SNPs can be unambiguously genotyped by mass spectrometry by measuring the differences in the mass of nucleic acids having alternative SNP alleles. MALDI-TOF (Matrix Assisted Laser Desorption Ionization—Time of Flight) mass spectrometry technology is preferred for extremely precise determinations of molecular mass, such as SNPs. Numerous approaches to SNP analysis have been developed based on mass spectrometry. Preferred mass spectrometry-based methods of SNP genotyping include primer extension assays, which can also be utilized in combination with other approaches, such as traditional gel-based formats and microarrays.

[0200] Typically, the primer extension assay involves designing and annealing a primer to a template PCR amplicon upstream (5′) from a target SNP position. A mix of dideoxynucleotide triphosphates (ddNTPs) and/or deoxynucleotide triphosphates (dNTPs) are added to a reaction mixture containing template (e.g., a SNP-containing nucleic acid molecule which has typically been amplified, such as by PCR), primer, and DNA polymerase. Extension of the primer terminates at the first position in the template where a nucleotide complementary to one of the ddNTPs in the mix occurs. The primer can be either immediately adjacent (i.e., the nucleotide at the 3′ end of the primer hybridizes to the nucleotide next to the target SNP site) or two or more nucleotides removed from the SNP position. If the primer is several nucleotides removed from the target SNP position, the only limitation is that the template sequence between the 3′ end of the primer and the SNP position cannot contain a nucleotide of the same type as the one to be detected, or this will cause premature termination of the extension primer. Alternatively, if all four ddNTPs alone, with no dNTPs, are added to the reaction mixture, the primer will always be extended by only one nucleotide, corresponding to the target SNP position. In this instance, primers are designed to bind one nucleotide upstream from the SNP position (i.e., the nucleotide at the 3′ end of the primer hybridizes to the nucleotide that is immediately adjacent to the target SNP site on the 5′ side of the target SNP site). Extension by only one nucleotide is preferable, as it minimizes the overall mass of the extended primer, thereby increasing the resolution of mass differences between alternative SNP nucleotides. Furthermore, mass-tagged ddNTPs can be employed in the primer extension reactions in place of unmodified ddNTPs. This increases the mass difference between primers extended with these ddNTPs, thereby providing increased sensitivity and accuracy, and is particularly useful for typing heterozygous base positions. Mass-tagging also alleviates the need for intensive sample-preparation procedures and decreases the necessary resolving power of the mass spectrometer.

[0201] The extended primers can then be purified and analyzed by MALDI-TOF mass spectrometry to determine the identity of the nucleotide present at the target SNP position. In one method of analysis, the products from the primer extension reaction are combined with light absorbing crystals that form a matrix. The matrix is then hit with an energy source such as a laser to ionize and desorb the nucleic acid molecules into the gas-phase. The ionized molecules are then ejected into a flight tube and accelerated down the tube towards a detector. The time between the ionization event, such as a laser pulse, and collision of the molecule with the detector is the time of flight of that molecule. The time of flight is precisely correlated with the mass-to-charge ratio (m/z) of the ionized molecule. Ions with smaller m/z travel down the tube faster than ions with larger m/z and therefore the lighter ions reach the detector before the heavier ions. The time-of-flight is then converted into a corresponding, and highly precise, m/z. In this manner, SNPs can be identified based on the slight differences in mass, and the corresponding time of flight differences, inherent in nucleic acid molecules having different nucleotides at a single base position. For further information regarding the use of primer extension assays in conjunction with MALDI-TOF mass spectrometry for SNP genotyping, see, e.g., Wise et al., “A standard protocol for single nucleotide primer extension in the human genome using matrix-assisted laser desorption/ionization time-of-flight mass spectrometry”, Rapid Commun Mass Spectrom. 2003; 17(11):1195-202.

[0202] The following references provide further information describing mass spectrometry-based methods for SNP genotyping: Bocker, “SNP and mutation discovery using base-specific cleavage and MALDI-TOF mass spectrometry”, Bioinformatics. July 2003 ;19 Suppl 1:I44-153; Storm et al., “MALDI-TOF mass spectrometry-based SNP genotyping”, Methods Mol Biol. 2003;212:241-62; Jurinke et al., “The use of Mass ARRAY technology for high throughput genotyping”, Adv Biochem Eng Biotechnol. 2002;77:57-74; and Jurinke et al., “Automated genotyping using the DNA MassArray technology”, Methods Mol Biol. 2002; 187:179-92.

[0203] SNPs can also be scored by direct DNA sequencing. A variety of automated sequencing procedures can be utilized ((1995) Biotechniques 19:448), including sequencing by mass spectrometry (see, e.g., PCT International Publication No. WO94/16101; Cohen et al., Adv. Chromatogr. 36:127-162 (1996); and Griffin et al., Appl Biochem. Biotechnol. 38:147-159 (1993)). The nucleic acid sequences of the present invention enable one of ordinary skill in the art to readily design sequencing primers for such automated sequencing procedures. Commercial instrumentation, such as the Applied Biosystems 377, 3100, 3700, 3730, and 3730×1 DNA Analyzers (Foster City, Calif.), is commonly used in the art for automated sequencing.

[0204] Other methods that can be used to genotype the SNPs of the present invention include single-strand conformational polymorphism (SSCP), and denaturing gradient gel electrophoresis (DGGE) (Myers et al., Nature 313:495 (1985)). SSCP identifies base differences by alteration in electrophoretic migration of single stranded PCR products, as described in Orita et al., Proc. Nat. Acad. Single-stranded PCR products can be generated by heating or otherwise denaturing double stranded PCR products. Single-stranded nucleic acids may refold or form secondary structures that are partially dependent on the base sequence. The different electrophoretic mobilities of single-stranded amplification products are related to base-sequence differences at SNP positions. DGGE differentiates SNP alleles based on the different sequence-dependent stabilities and melting properties inherent in polymorphic DNA and the corresponding differences in electrophoretic migration patterns in a denaturing gradient gel (Erlich, ed., PCR Technology, Principles and Applications for DNA Amplification, W. H. Freeman and Co, New York, 1992, Chapter 7).

[0205] Sequence-specific ribozymes (U.S. Pat. No. 5,498,531) can also be used to score SNPs based on the development or loss of a ribozyme cleavage site. Perfectly matched sequences can be distinguished from mismatched sequences by nuclease cleavage digestion assays or by differences in melting temperature. If the SNP affects a restriction enzyme cleavage site, the SNP can be identified by alterations in restriction enzyme digestion patterns, and the corresponding changes in nucleic acid fragment lengths determined by gel electrophoresis

[0206] SNP genotyping can include the steps of, for example, collecting a biological sample from a human subject (e.g., sample of tissues, cells, fluids, secretions, etc.), isolating nucleic acids (e.g., genomic DNA, mRNA or both) from the cells of the sample, contacting the nucleic acids with one or more primers which specifically hybridize to a region of the isolated nucleic acid containing a target SNP under conditions such that hybridization and amplification of the target nucleic acid region occurs, and determining the nucleotide present at the SNP position of interest, or, in some assays, detecting the presence or absence of an amplification product (assays can be designed so that hybridization and/or amplification will only occur if a particular SNP allele is present or absent). In some assays, the size of the amplification product is detected and compared to the length of a control sample; for example, deletions and insertions can be detected by a change in size of the amplified product compared to a normal genotype.

[0207] SNP genotyping is useful for numerous practical applications, as described below. Examples of such applications include, but are not limited to, SNP-disease association analysis, disease predisposition screening, disease diagnosis, disease prognosis, disease progression monitoring, determining therapeutic strategies based on an individual's genotype (“pharmacogenomics”), developing therapeutic agents based on SNP genotypes associated with a disease or likelihood of responding to a drug, stratifying a patient population for clinical trial for a treatment regimen, predicting the likelihood that an individual will experience toxic side effects from a therapeutic agent, and human identification applications such as forensics.

[0208] Analysis of Genetic Association Between SNPs and Phenotypic Traits

[0209] SNP genotyping for disease diagnosis, disease predisposition screening, disease prognosis, determining drug responsiveness (pharnacogenomics), drug toxicity screening, and other uses described herein, typically relies on initially establishing a genetic association between one or more specific SNPs and the particular phenotypic traits of interest.

[0210] Different study designs may be used for genetic association studies (Modern Epidemiology, Lippincott Williams & Wilkins (1998), 609-622). Observational studies are most frequently carried out in which the response of the patients is not interfered with. The first type of observational study identifies a sample of persons in whom the suspected cause of the disease is present and another sample of persons in whom the suspected cause is absent, and then the frequency of development of disease in the two samples is compared. These sampled populations are called cohorts, and the study is a prospective study. The other type of observational study is case-control or a retrospective study. In typical case-control studies, samples are collected from individuals with the phenotype of interest (cases) such as certain manifestations of a disease, and from individuals without the phenotype (controls) in a population (target population) that conclusions are to be drawn from. Then the possible causes of the disease are investigated retrospectively. As the time and costs of collecting samples in case-control studies are considerably less than those for prospective studies, case-control studies are the more commonly used study design in genetic association studies, at least during the exploration and discovery stage.

[0211] In both types of observational studies, there may be potential confounding factors that should be taken into consideration. Confounding factors are those that are associated with both the real cause(s) of the disease and the disease itself, and they include demographic information such as age, gender, ethnicity as well as environmental factors. When confounding factors are not matched in cases and controls in a study, and are not controlled properly, spurious association results can arise. If potential confounding factors are identified, they should be controlled for by analysis methods explained below.

[0212] In a genetic association study, the cause of interest to be tested is a certain allele or a SNP or a combination of alleles or a haplotype from several SNPs. Thus, tissue specimens (e.g., whole blood) from the sampled individuals may be collected and genomic DNA genotyped for the SNP(s) of interest. In addition to the phenotypic trait of interest, other information such as demographic (e.g., age, gender, ethnicity, etc.), clinical, and environmental information that may influence the outcome of the trait can be collected to further characterize and define the sample set. In many cases, these factors are known to be associated with diseases and/or SNP allele frequencies. There are likely gene-environment and/or gene-gene interactions as well. Analysis methods to address gene-environment and gene-gene interactions (for example, the effects of the presence of both susceptibility alleles at two different genes can be greater than the effects of the individual alleles at two genes combined) are discussed below.

[0213] After all the relevant phenotypic and genotypic information has been obtained, statistical analyses are carried out to determine if there is any significant correlation between the presence of an allele or a genotype with the phenotypic characteristics of an individual. Preferably, data inspection and cleaning are first performed before carrying out statistical tests for genetic association. Epidemiological and clinical data of the samples can be summarized by descriptive statistics with tables and graphs. Data validation is preferably performed to check for data completion, inconsistent entries, and outliers. Chi-squared tests and t-tests (Wilcoxon rank-sum tests if distributions are not normal) may then be used to check for significant differences between cases and controls for discrete and continuous variables, respectively. To ensure genotyping quality, Hardy-Weinberg disequilibrium tests can be performed on cases and controls separately. Significant deviation from Hardy-Weinberg equilibrium (HWE) in both cases and controls for individual markers can be indicative of genotyping errors. If HWE is violated in a majority of markers, it is indicative of population substructure that should be further investigated. Moreover, Hardy-Weinberg disequilibrium in cases only can indicate genetic association of the markers with the disease (Genetic Data Analysis, Weir B., Sinauer (1990)).

[0214] To test whether an allele of a single SNP is associated with the case or control status of a phenotypic trait, one skilled in the art can compare allele frequencies in cases and controls. Standard chi-squared tests and Fisher exact tests can be carried out on a 2×2 table (2 SNP alleles×2 outcomes in the categorical trait of interest). To test whether genotypes of a SNP are associated, chi-squared tests can be carried out on a 3×2 table (3 genotypes×2 outcomes). Score tests are also carried-out for genotypic association to contrast the three genotypic frequencies (major homozygotes, heterozygotes and minor homozygotes) in cases and controls, and to look for trends using 3 different modes of inheritance, namely dominant (with contrast coefficients 2, −1, −1), additive (with contrast coefficients 1, 0, −1) and recessive (with contrast coefficients 1, 1, −2). Odds ratios for minor versus major alleles, and odds ratios for heterozygote and homozygote variants versus the wild type genotypes are calculated with the desired confidence limits, usually 95%.

[0215] In order to control for confounders and to test for interaction and effect modifiers, stratified analyses may be performed using stratified factors that are likely to be confounding, including demographic information such as age, ethnicity, and gender, or an interacting element or effect modifier, such as a known major gene (e.g., APOE for Alzheimer's disease or HLA genes for autoimmune diseases), or environmental factors such as smoking in lung cancer. Stratified association tests may be carried out using Cochran-Mantel-Haenszel tests that take into account the ordinal nature of genotypes with 0, 1, and 2 variant alleles. Exact tests by StatXact may also be performed when computationally possible. Another way to adjust for confounding effects and test for interactions is to perform stepwise multiple logistic regression analysis using statistical packages such as SAS or R. Logistic regression is a model-building technique in which the best fitting and most parsimonious model is built to describe the relation between the dichotomous outcome (for instance, getting a certain disease or not) and a set of independent variables (for instance, genotypes of different associated genes, and the associated demographic and environmental factors). The most common model is one in which the logit transformation of the odds ratios is expressed as a linear combination of the variables (main effects) and their cross-product terms (interactions) (Applied Logistic Regression, Hosmer and Lemeshow, Wiley (2000)). To test whether a certain variable or interaction is significantly associated with the outcome, coefficients in the model are first estimated and then tested for statistical significance of their departure from zero.

[0216] In addition to performing association tests one marker at a time, haplotype association analysis may also be performed to study a number of markers that are closely linked together. Haplotype association tests can have better power than genotypic or allelic association tests when the tested markers are not the disease-causing mutations themselves but are in linkage disequilibrium with such mutations. The test will even be more powerful if the disease is indeed caused by a combination of alleles on a haplotype (e.g., APOE is a haplotype formed by 2 SNPs that are very close to each other). In order to perform haplotype association effectively, marker-marker linkage disequilibrium measures, both D′ and R², are typically calculated for the markers within a gene to elucidate the haplotype structure. Recent studies (Daly et al, Nature Genetics, 29, 232-235, 2001) in linkage disequilibrium indicate that SNPs within a gene are organized in block pattern, and a high degree of linkage disequilibrium exists within blocks and very little linkage disequilibrium exists between blocks. Haplotype association with the disease status can be performed using such blocks once they have been elucidated.

[0217] Haplotype association tests can be carried out in a similar fashion as the allelic and genotypic association tests. Each haplotype in a gene is analogous to an allele in a multi-allelic marker. One skilled in the art can either compare the haplotype frequencies in cases and controls or test genetic association with different pairs of haplotypes. It has been proposed (Schaid et al, Am. J. Hum. Genet., 70, 425-434, 2002) that score tests can be done on haplotypes using the program “haplo.score”. In that method, haplotypes are first inferred by EM algorithm and score tests are carried out with a generalized linear model (GLM) framework that allows the adjustment of other factors.

[0218] An important decision in the performance of genetic association tests is the determination of the significance level at which significant association can be declared when the p-value of the tests reaches that level. In an exploratory analysis where positive hits will be followed up in subsequent confirmatory testing, an unadjusted p-value<0.2 (a significance level on the lenient side), for example, may be used for generating hypotheses for significant association of a SNP with certain phenotypic characteristics of a disease. It is preferred that a p-value<0.05 (a significance level traditionally used in the art) is achieved in order for a SNP to be considered to have an association with a disease. It is more preferred that a p-value<0.01 (a significance level on the stringent side) is achieved for an association to be declared. When hits are followed up in confirmatory analyses in more samples of the same source or in different samples from different sources, adjustment for multiple testing will be performed as to avoid excess number of hits while maintaining the experiment-wide error rates at 0.05. While there are different methods to adjust for multiple testing to control for different kinds of error rates, a commonly used but rather conservative method is Bonferroni correction to control the experiment-wise or family-wise error rate (Multiple comparisons and multiple tests, Westfall et al, SAS Institute (1999)). Permutation tests to control for the false discovery rates, FDR, can be more powerful (Benjamini and Hochberg, Journal of the Royal Statistical Society, Series B 57, 1289-1300, 1995, Resampling-based Multiple Testing, Westfall and Young, Wiley (1993)). Such methods to control for multiplicity would be preferred when the tests are dependent and controlling for false discovery rates is sufficient as opposed to controlling for the experiment-wise error rates.

[0219] In replication studies using samples from different populations after statistically significant markers have been identified in the exploratory stage, meta-analyses can then be performed by combining evidence of different studies (Modern Epidemiology, Lippincott Williams & Wilkins, 1998, 643-673). If available, association results known in the art for the same SNPs can be included in the meta-analyses.

[0220] Since both genotyping and disease status classification can involve errors, sensitivity analyses may be performed to see how odds ratios and p-values would change upon various estimates on genotyping and disease classification error rates.

[0221] It has been well known that subpopulation-based sampling bias between cases and controls can lead to spurious results in case-control association studies (Ewens and Spielman, Am. J. Hum. Genet. 62, 450-458, 1995) when prevalence of the disease is associated with different subpopulation groups. Such bias can also lead to a loss of statistical power in genetic association studies. To detect population stratification, Pritchard and Rosenberg (Pritchard et al. Am. J. Hum. Gen. 1999, 65:220-228) suggested typing markers that are unlinked to the disease and using results of association tests on those markers to determine whether there is any population stratification. When stratification is detected, the genomic control (GC) method as proposed by Devlin and Roeder (Devlin et al. Biometrics. 1999, 55:997-1004) can be used to adjust for the inflation of test statistics due to population stratification. GC method is robust to changes in population structure levels as well as being applicable to DNA pooling designs (Devlin et al. Genet. Epidem. 20001, 21:273-284).

[0222] While Pritchard's method recommended using 15-20 unlinked microsatellite markers, it suggested using more than 30 biallelic markers to get enough power to detect population stratification. For the GC method, it has been shown (Bacanu et al. Am. J. Hum. Genet. 2000, 66:1933-1944) that about 60-70 biallelic markers are sufficient to estimate the inflation factor for the test statistics due to population stratification. Hence, 70 intergenic SNPs can be chosen in unlinked regions as indicated in a genome scan (Kehoe et al. Hum. Mol. Genet. 1999, 8:237-245).

[0223] Once individual risk factors, genetic or non-genetic, have been found for the predisposition to disease, the next step is to set up a classification/prediction scheme to predict the category (for instance, disease or no-disease) that an individual will be in depending on his genotypes of associated SNPs and other non-genetic risk factors. Logistic regression for discrete trait and linear regression for continuous trait are standard techniques for such tasks (Applied Regression Analysis, Draper and Smith, Wiley (1998)). Moreover, other techniques can also be used for setting up classification. Such techniques include, but are not limited to, MART, CART, neural network, and discriminant analyses that are suitable for use in comparing the performance of different methods (The Elements of Statistical Learning, Hastie, Tibshirani & Friedman, Springer (2002)).

[0224] Disease Diagnosis and Predisposition Screening

[0225] Information on association/correlation between genotypes and disease-related phenotypes can be exploited in several ways. For example, in the case of a highly statistically significant association between one or more SNPs with predisposition to a disease for which treatment is available, detection of such a genotype pattern in an individual may justify immediate administration of treatment, or at least the institution of regular monitoring of the individual. Detection of the susceptibility alleles associated with serious disease in a couple contemplating having children may also be valuable to the couple in their reproductive decisions. In the case of a weaker but still statistically significant association between a SNP and a human disease, immediate therapeutic intervention or monitoring may not be justified after detecting the susceptibility allele or SNP. Nevertheless, the subject can be motivated to begin simple life-style changes (e.g., diet, exercise) that can be accomplished at little or no cost to the individual but would confer potential benefits in reducing the risk of developing conditions for which that individual may have an increased risk by virtue of having the susceptibility allele(s).

[0226] The SNPs of the invention may contribute to MI in an individual in different ways. Some polymorphisms occur within a protein coding sequence and contribute to disease phenotype by affecting protein structure. Other polymorphisms occur in noncoding regions but may exert phenotypic effects indirectly via influence on, for example, replication, transcription, and/or translation. A single SNP may affect more than one phenotypic trait. Likewise, a single phenotypic trait may be affected by multiple SNPs in different genes.

[0227] As used herein, the terms “diagnose”, “diagnosis”, and “diagnostics” include, but are not limited to any of the following: detection of MI that an individual may presently have, predisposition/susceptibility screening (i.e., determining the increased risk of an individual in developing MI in the future, or determining whether an individual has a decreased risk of developing MI in the future), determining a particular type or subclass of MI in an individual known to have MI, confirming or reinforcing a previously made diagnosis of MI, pharmacogenomic evaluation of an individual to determine which therapeutic strategy that individual is most likely to positively respond to or to predict whether a patient is likely to respond to a particular treatment, predicting whether a patient is likely to experience toxic effects from a particular treatment or therapeutic compound, and evaluating the future prognosis of an individual having MI. Such diagnostic uses are based on the SNPs individually or in a unique combination or SNP haplotypes of the present invention.

[0228] Haplotypes are particularly useful in that, for example, fewer SNPs can be genotyped to determine if a particular genomic region harbors a locus that influences a particular phenotype, such as in linkage disequilibrium-based SNP association analysis.

[0229] Linkage disequilibrium (LD) refers to the co-inheritance of alleles (e.g., alternative nucleotides) at two or more different SNP sites at frequencies greater than would be expected from the separate frequencies of occurrence of each allele in a given population. The expected frequency of co-occurrence of two alleles that are inherited independently is the frequency of the first allele multiplied by the frequency of the second allele. Alleles that co-occur at expected frequencies are said to be in “linkage equilibrium”. In contrast, LD refers to any non-random genetic association between allele(s) at two or more different SNP sites, which is generally due to the physical proximity of the two loci along a chromosome. LD can occur when two or more SNPs sites are in close physical proximity to each other on a given chromosome and therefore alleles at these SNP sites will tend to remain unseparated for multiple generations with the consequence that a particular nucleotide (allele) at one SNP site will show a non-random association with a particular nucleotide (allele) at a different SNP site located nearby. Hence, genotyping one of the SNP sites will give almost the same information as genotyping the other SNP site that is in LD.

[0230] Various degrees of LD can be encountered between two or more SNPs with the result being that some SNPs are more closely associated (i.e., in stronger LD) than others. Furthermore, the physical distance over which LD extends along a chromosome differs between different regions of the genome, and therefore the degree of physical separation between two or more SNP sites necessary for LD to occur can differ between different regions of the genome.

[0231] For diagnostic purposes and similar uses, if a particular SNP site is found to be useful for diagnosing MI (e.g., has a significant statistical association with the condition and/or is recognized as a causative polymorphism for the condition), then the skilled artisan would recognize that other SNP sites which are in LD with this SNP site would also be useful for diagnosing the condition. Thus, polymorphisms (e.g., SNPs and/or haplotypes) that are not the actual disease-causing (causative) polymorphisms, but are in LD with such causative polymorphisms, are also useful. In such instances, the genotype of the polymorphism(s) that is/are in LD with the causative polymorphism is predictive of the genotype of the causative polymorphism and, consequently, predictive of the phenotype (e.g., MI) that is influenced by the causative SNP(s). Therefore, polymorphic markers that are in LD with causative polymorphisms are useful as diagnostic markers, and are particularly useful when the actual causative polymorphism(s) is/are unknown.

[0232] Examples of polymorphisms that can be in LD with one or more causative polymorphisms (and/or in LD with one or more polymorphisms that have a significant statistical association with a condition) and therefore useful for diagnosing the same condition that the causative/associated SNP(s) is used to diagnose, include, for example, other SNPs in the same gene, protein-coding, or mRNA transcript-coding region as the causative/associated SNP, other SNPs in the same exon or same intron as the causative/associated SNP, other SNPs in the same haplotype block as the causative/associated SNP, other SNPs in the same intergenic region as the causative/associated SNP, SNPs that are outside but near a gene (e.g., within 6 kb on either side, 5′ or 3′, of a gene boundary) that harbors a causative/associated SNP, etc. Such useful LD SNPs can be selected from among the SNPs disclosed in Tables 1-2, for example.

[0233] Linkage disequilibrium in the human genome is reviewed in: Wall et al., “Haplotype blocks and linkage disequilibrium in the human genome”, Nat Rev Genet. August 2003;4(8):587-97; Garner et al., “On selecting markers for association studies: patterns of linkage disequilibrium between two and three diallelic loci”, Genet Epidemiol. January 2003;24(1):57-67; Ardlie et al., “Patterns of linkage disequilibrium in the human genome”, Nat Rev Genet. April 2002;3(4):299-309 (erratum in Nat Rev Genet July 2002; 3(7):566); and Remm et al., “High-density genotyping and linkage disequilibrium in the human genome using chromosome 22 as a model”; Curr Opin Chem Biol. February 2002; ;6(1):24-30.

[0234] The contribution or association of particular SNPs and/or SNP haplotypes with disease phenotypes, such as MI, enables the SNPs of the present invention to be used to develop superior diagnostic tests capable of identifying individuals who express a detectable trait, such as MI, as the result of a specific genotype, or individuals whose genotype places them at an increased or decreased risk of developing a detectable trait at a subsequent time as compared to individuals who do not have that genotype. As described herein, diagnostics may be based on a single SNP or a group of SNPs.

[0235] Combined detection of a plurality of SNPs (for example, 2, 3, 4, 5, 6, 7, 8, 9, 10, 11, 12, 13, 14, 15, 16, 17, 18, 19, 20, 24, 25, 30, 32, 48, 50, 64, 96, 100, or any other number in-between, or more, of the SNPs provided in Table 1 and/or Table 2) typically increases the probability of an accurate diagnosis. For example, the presence of a single SNP known to correlate with MI might indicate a probability of 20% that an individual has or is at risk of developing MI, whereas detection of five SNPs, each of which correlates with MI, might indicate a probability of 80% that an individual has or is at risk of developing MI. To further increase the accuracy of diagnosis or predisposition screening, analysis of the SNPs of the present invention can be combined with that of other polymorphisms or other risk factors of MI, such as disease symptoms, pathological characteristics, family history, diet, environmental factors or lifestyle factors.

[0236] It will, of course, be understood by practitioners skilled in the treatment or diagnosis of MI that the present invention generally does not intend to provide an absolute identification of individuals who are at risk (or less at risk) of developing MI, and/or pathologies related to MI, but rather to indicate a certain increased (or decreased) degree or likelihood of developing the disease based on statistically significant association results. However, this information is extremely valuable as it can be used to, for example, initiate preventive treatments or to allow an individual carrying one or more significant SNPs or SNP haplotypes to foresee warning signs such as minor clinical symptoms, or to have regularly scheduled physical exams to monitor for appearance of a condition in order to identify and begin treatment of the condition at an early stage. Particularly with diseases that are extremely debilitating or fatal if not treated on time, the knowledge of a potential predisposition, even if this predisposition is not absolute, would likely contribute in a very significant manner to treatment efficacy.

[0237] The diagnostic techniques of the present invention may employ a variety of methodologies to determine whether a test subject has a SNP or a SNP pattern associated with an increased or decreased risk of developing a detectable trait or whether the individual suffers from a detectable trait as a result of a particular polymorphism/mutation, including, for example, methods which enable the analysis of individual chromosomes for haplotyping, family studies, single sperm DNA analysis, or somatic hybrids. The trait analyzed using the diagnostics of the invention may be any detectable trait that is commonly observed in pathologies and disorders related to MI.

[0238] Another aspect of the present invention relates to a method of determining whether an individual is at risk (or less at risk) of developing one or more traits or whether an individual expresses one or more traits as a consequence of possessing a particular trait-causing or trait-influencing allele. These methods generally involve obtaining a nucleic acid sample from an individual and assaying the nucleic acid sample to determine which nucleotide(s) is/are present at one or more SNP positions, wherein the assayed nucleotide(s) is/are indicative of an increased or decreased risk of developing the. trait or indicative that the individual expresses the trait as a result of possessing a particular trait-causing or trait-influencing allele.

[0239] In another embodiment, the SNP detection reagents of the present invention are used to determine whether an individual has one or more SNP allele(s) affecting the level (e.g., the concentration of mRNA or protein in a sample, etc.) or pattern (e.g., the kinetics of expression, rate of decomposition, stability profile, Km, Vmax, etc.) of gene expression (collectively, the “gene response” of a cell or bodily fluid). Such a determination can be accomplished by screening for mRNA or protein expression (e.g., by using nucleic acid arrays, RT-PCR, TaqMan assays, or mass spectrometry), identifying genes having altered expression in an individual, genotyping SNPs disclosed in Table 1 and/or Table 2 that could affect the expression of the genes having altered expression (e.g., SNPs that are in and/or around the gene(s) having altered expression, SNPs in regulatory/control regions, SNPs in and/or around other genes that are involved in pathways that could affect the expression of the gene(s) having altered expression, or all SNPs could be genotyped), and correlating SNP genotypes with altered gene expression. In this manner, specific SNP alleles at particular SNP sites can be identified that affect gene expression.

[0240] Pharmacogenomics and Therapeutics/Drug Development

[0241] The present invention provides methods for assessing the pharmacogenomics of a subject harboring particular SNP alleles or haplotypes to a particular therapeutic agent or pharmaceutical compound, or to a class of such compounds. Pharmacogenomics deals with the roles which clinically significant hereditary variations (e.g., SNPs) play in the response to drugs due to altered drug disposition and/or abnormal action in affected persons. See, e.g., Roses, Nature 405, 857-865 (2000); Gould Rothberg, Nature Biotechnology 19, 209-211 (2001); Eichelbaum, Clin. Exp. Pharmacol. Physiol. 23(10-11):983-985 (1996); and Linder, Clin. Chem. 43(2):254-266 (1997). The clinical outcomes of these variations can result in severe toxicity of therapeutic drugs in certain individuals or therapeutic failure of drugs in certain individuals as a result of individual variation in metabolism. Thus, the SNP genotype of an individual can determine the way a therapeutic compound acts on the body or the way the body metabolizes the compound. For example, SNPs in drug metabolizing enzymes can affect the activity of these enzymes, which in turn can affect both the intensity and duration of drug action, as well as drug metabolism and clearance.

[0242] The discovery of SNPs in drug metabolizing enzymes, drug transporters, proteins for pharmaceutical agents, and other drug targets has explained why some patients do not obtain the expected drug effects, show an exaggerated drug effect, or experience serious toxicity from standard drug dosages. SNPs can be expressed in the phenotype of the extensive metabolizer and in the phenotype of the poor metabolizer. Accordingly, SNPs may lead to allelic variants of a protein in which one or more of the protein functions in one population are different from those in another population. SNPs and the encoded variant peptides thus provide targets to ascertain a genetic predisposition that can affect treatment modality. For example, in a ligand-based treatment, SNPs may give rise to amino terminal extracellular domains and/or other ligand-binding regions of a receptor that are more or less active in ligand binding, thereby affecting subsequent protein activation. Accordingly, ligand dosage would necessarily be modified to maximize the therapeutic effect within a given population containing particular SNP alleles or haplotypes.

[0243] As an alternative to genotyping, specific variant proteins containing variant amino acid sequences encoded by alternative SNP alleles could be identified. Thus, pharmacogenomic characterization of an individual permits the selection of effective compounds and effective dosages of such compounds for prophylactic or therapeutic uses based on the individual's SNP genotype, thereby enhancing and optimizing the effectiveness of the therapy. Furthermore, the production of recombinant cells and transgenic animals containing particular SNPs/haplotypes allow effective clinical design and testing of treatment compounds and dosage regimens. For example, transgenic animals can be produced that differ only in specific SNP alleles in a gene that is orthologous to a human disease susceptibility gene.

[0244] Pharmacogenomic uses of the SNPs of the present invention provide several significant advantages for patient care, particularly in treating MI. Pharmacogenomic characterization of an individual, based on an individual's SNP genotype, can identify those individuals unlikely to respond to treatment with a particular medication and thereby allows physicians to avoid prescribing the ineffective medication to those individuals. On the other hand, SNP genotyping of an individual may enable physicians to select the appropriate medication and dosage regimen that will be most effective based on an individual's SNP genotype. This information increases a physician's confidence in prescribing medications and motivates patients to comply with their drug regimens. Furthermore, pharmacogenomics may identify patients predisposed to toxicity and adverse reactions to particular drugs or drug dosages. Adverse drug reactions lead to more than 100,000 avoidable deaths per year in the United States alone and therefore represent a significant cause of hospitalization and death, as well as a significant economic burden on the healthcare system (Pfost et. al., Trends in Biotechnology, August 2000.). Thus, pharmacogenomics based on the SNPs disclosed herein has the potential to both save lives and reduce healthcare costs substantially.

[0245] Pharmacogenomics in general is discussed further in Rose et al., “Pharmacogenetic analysis of clinically relevant genetic polymorphisms”, Methods Mol Med. 2003;85:225-37. Pharmacogenomics as it relates to Alzheimer's disease and other neurodegenerative disorders is discussed in Cacabelos, “Pharmacogenomics for the treatment of dementia”, Ann Med. 2002;34(5):357-79, Maimone et al., “Pharmacogenomics of neurodegenerative diseases”, Eur J Pharmacol. Feb. 9, 2001; 413(1):11-29, and Poirier, “Apolipoprotein E: a pharmacogenetic target for the treatment of Alzheimer's disease”, Mol Diagn. December 1999;4(4):335-41. Pharmacogenomics as it relates to cardiovascular disorders is discussed in Siest et al., “Pharmacogenomics of drugs affecting the cardiovascular system”, Clin Chem Lab Med. April 2003;41(4):590-9, Mukheijee et al., “Pharmacogenomics in cardiovascular diseases”, Prog Cardiovasc Dis. May-June 2002;44(6):479-98, and Mooser et al., “Cardiovascular pharmacogenetics in the SNP era”, J Thromb Haemost. July 2003; 1(7):1398-402. Pharmacogenomics as it relates to cancer is discussed in McLeod et al., “Cancer pharmacogenomics: SNPs, chips, and the individual patient”, Cancer Invest. 2003;21(4):630-40 and Watters et al., “Cancer pharmacogenomics: current and future applications”, Biochim Biophys Acta. March 17, 2003;1603(2):99-111.

[0246] The SNPs of the present invention also can be used to identify novel therapeutic targets for MI. For example, genes containing the disease-associated variants (“variant genes”) or their products, as well as genes or their products that are directly or indirectly regulated by or interacting with these variant genes or their products, can be targeted for the development of therapeutics that, for example, treat the disease or prevent or delay disease onset. The therapeutics may be composed of, for example, small molecules, proteins, protein fragments or peptides, antibodies, nucleic acids, or their derivatives or mimetics which modulate the functions or levels of the target genes or gene products.

[0247] The SNP-containing nucleic acid molecules disclosed herein, and their complementary nucleic acid molecules, may be used as antisense constructs to control gene expression in cells, tissues, and organisms. Antisense technology is well established in the art and extensively reviewed in Antisense Drug Technology: Principles, Strategies, and Applications, Crooke (ed.), Marcel Dekker, Inc.: New York (2001). An antisense nucleic acid molecule is generally designed to be complementary to a region of mRNA expressed by a gene so that the antisense molecule hybridizes to the mRNA and thereby blocks translation of mRNA into protein. Various classes of antisense oligonucleotides are used in the art, two of which are cleavers and blockers. Cleavers, by binding to target RNAs, activate intracellular nucleases (e.g., RNaseH or RNase L) that cleave the target RNA. Blockers, which also bind to target RNAs, inhibit protein translation through steric hindrance of ribosomes. Exemplary blockers include peptide nucleic acids, morpholinos, locked nucleic acids, and methylphosphonates (see, e.g., Thompson, Drug Discovery Today, 7 (17): 912-917 (2002)). Antisense oligonucleotides are directly useful as therapeutic agents, and are also useful for determining and validating gene function (e.g., in gene knock-out or knock-down experiments).

[0248] Antisense technology is further reviewed in: Lavery et al., “Antisense and RNAi:

[0249] powerful tools in drug target discovery and validation”, Curr Opin Drug Discov Devel. July 2003;6(4):561-9; Stephens et al., “Antisense oligonucleotide therapy in cancer”, Curr Opin Mol Ther. April 2003;5(2):118-22; Kurreck, “Antisense technologies. Improvement through novel chemical modifications”, Eur J Biochem. April 2003;270(8): 1628-44; Dias et al., “Antisense oligonucleotides: basic concepts and mechanisms”, Mol Cancer Ther. March 2002;1(5):347-55; Chen, “Clinical development of antisense oligonucleotides as anti-cancer therapeutics”, Methods Mol Med. 2003 ;75 :621-36; Wang et al., “Antisense anticancer oligonucleotide therapeutics”, Curr Cancer Drug Targets. November 2001;1(3):177-96; and Bennett, “Efficiency of antisense oligonucleotide drug discovery”, Antisense Nucleic Acid Drug Dev. June 2002;12(3):215-24.

[0250] The SNPs of the present invention are particularly useful for designing antisense reagents that are specific for particular nucleic acid variants. Based on the SNP information disclosed herein, antisense oligonucleotides can be produced that specifically target mRNA molecules that contain one or more particular SNP nucleotides. In this manner, expression of mRNA molecules that contain one or more undesired polymorphisms (e.g., SNP nucleotides that lead to a defective protein such as an amino acid substitution in a catalytic domain) can be inhibited or completely blocked. Thus, antisense oligonucleotides can be used to specifically bind a particular polymorphic form (e.g., a SNP allele that encodes a defective protein), thereby inhibiting translation of this form, but which do not bind an alternative polymorphic form (e.g., an alternative SNP nucleotide that encodes a protein having normal function).

[0251] Antisense molecules can be used to inactivate mRNA in order to inhibit gene expression and production of defective proteins. Accordingly, these molecules can be used to treat a disorder, such as MI, characterized by abnormal or undesired gene expression or expression of certain defective proteins. This technique can involve cleavage by means of ribozymes containing nucleotide sequences complementary to one or more regions in the mRNA that attenuate the ability of the mRNA to be translated. Possible mRNA regions include, for example, protein-coding regions and particularly protein-coding regions corresponding to catalytic activities, substrate/ligand binding, or other functional activities of a protein.

[0252] The SNPs of the present invention are also useful for designing RNA interference reagents that specifically target nucleic acid molecules having particular SNP variants. RNA interference (RNAi), also referred to as gene silencing, is based on using double-stranded RNA (dsRNA) molecules to turn genes off. When introduced into a cell, dsRNAs are processed by the cell into short fragments (generally about 21, 22, or 23 nucleotides in length) known as small interfering RNAs (siRNAs) which the cell uses in a sequence-specific manner to recognize and destroy complementary RNAs,(Thompson, Drug Discovery Today, 7 (17): 912-917 (2002)). Accordingly, an aspect of the present invention specifically contemplates isolated nucleic acid molecules that are about 18-26 nucleotides in length, preferably 19-25 nucleotides in length, and more preferably 20, 21, 22, or 23 nucleotides in length, and the use of these nucleic acid molecules for RNAi. Because RNAi molecules, including siRNAs, act in a sequence-specific manner, the SNPs of the present invention can be used to design RNAi reagents that recognize and destroy nucleic acid molecules having specific SNP alleles/nucleotides (such as deleterious alleles that lead to the production of defective proteins), while not affecting nucleic acid molecules having alternative SNP alleles (such as alleles that encode proteins having normal function). As with antisense reagents, RNAi reagents may be directly useful as therapeutic agents (e.g., for turning off defective, disease-causing genes), and are also useful for characterizing and validating gene function (e.g., in gene knock-out or knock-down experiments).

[0253] The following references provide a further review of RNAi: Reynolds et al., “Rational siRNA design for RNA interference”, Nat Biotechnol. March 2004;22(3):326-30. Epub Feb. 1, 2004; Chi et al., “Genomewide view of gene silencing by small interfering RNAs”, PNAS 100(11):6343-6346, 2003; Vickers et al., “Efficient Reduction of Target RNAs by Small Interfering RNA and RNase H-dependent Antisense Agents”, J. Biol. Chem. 278: 7108-7118, 2003; Agami, “RNAi and related mechanisms and their potential use for therapy”, Curr Opin Chem Biol. December 2002;6(6):829-34; Lavery et al., “Antisense and RNAi: powerful tools in drug target discovery and validation”, Curr Opin Drug Discov Devel. July 2003;6(4):561-9; Shi, “Mammalian RNAi for the masses”, Trends Genet January 2003;19(l):9-12), Shuey et al., “RNAI: gene-silencing in therapeutic intervention”, Drug Discovery Today October 2002;7(20):1040-1046; McManus et al., Nat Rev Genet October 2002;3(10):737-47; Xia et al., Nat Biotechnol October 2002;20(10):1006-10; Plasterk et al., Curr Opin Genet Dev October 2000;10(5):562-7; Bosher et al., Nat Cell Biol February 2000;2(2):E31-6; and Hunter, Curr Biol June 17, 1999;9(12):R440-2).

[0254] A subject suffering from a pathological condition, such as MI, ascribed to a SNP may be treated so as to correct the genetic defect (see Kren et al., Proc. Natl. Acad. Sci. USA 96:10349-10354 (1999)). Such a subject can be identified by any method that can detect the polymorphism in a biological sample drawn from the subject. Such a genetic defect may be permanently corrected by administering to such a subject a nucleic acid fragment incorporating a repair sequence that supplies the normal/wild-type nucleotide at the position of the SNP. This site-specific repair sequence can encompass an RNA/DNA oligonucleotide that operates to promote endogenous repair of a subject's genomic DNA. The site-specific repair sequence is administered in an appropriate vehicle, such as a complex with polyethylenimine, encapsulated in anionic liposomes, a viral vector such as an adenovirus, or other pharmaceutical composition that promotes intracellular uptake of the administered nucleic acid. A genetic defect leading to an inborn pathology may then be overcome, as the chimeric oligonucleotides induce incorporation of the normal sequence into the subject's genome. Upon incorporation, the normal gene product is expressed, and the replacement is propagated, thereby engendering a permanent repair and therapeutic enhancement of the clinical condition of the subject.

[0255] In cases in which a cSNP results in a variant protein that is ascribed to be the cause of, or a contributing factor to, a pathological condition, a method of treating such a condition can include administering to a subject experiencing the pathology the wild-type/normal cognate of the variant protein. Once administered in an effective dosing regimen, the wild-type cognate provides complementation or remediation of the pathological condition.

[0256] The invention further provides a method for identifying a compound or agent that can be used to treat MI. The SNPs disclosed herein are useful as targets for the identification and/or development of therapeutic agents. A method for identifying a therapeutic agent or compound typically includes assaying the ability of the agent or compound to modulate the activity and/or expression of a SNP-containing nucleic acid or the encoded product and thus identifying an agent or a compound that can be used to treat a disorder characterized by undesired activity or expression of the SNP-containing nucleic acid or the encoded product. The assays can be performed in cell-based and cell-free systems. Cell-based assays can include cells naturally expressing the nucleic acid molecules of interest or recombinant cells genetically engineered to express certain nucleic acid molecules.

[0257] Variant gene expression in a MI patient can include, for example, either expression of a SNP-containing nucleic acid sequence (for instance, a gene that contains a SNP can be transcribed into an mRNA transcript molecule containing the SNP, which can in turn be translated into a variant protein) or altered expression of a normal/wild-type nucleic acid sequence due to one or more SNPs (for instance, a regulatory/control region can contain a SNP that affects the level or pattern of expression of a normal transcript).

[0258] Assays for variant gene expression can involve direct assays of nucleic acid levels (e.g., mRNA levels), expressed protein levels, or of collateral compounds involved in a signal pathway. Further, the expression of genes that are up- or down-regulated in response to the signal pathway can also be assayed. In this embodiment, the regulatory regions of these genes can be operably linked to a reporter gene such as luciferase.

[0259] Modulators of variant gene expression can be identified in a method wherein, for example, a cell is contacted with a candidate compound/agent and the expression of mRNA determined. The level of expression of mRNA in the presence of the candidate compound is compared to the level of expression of mRNA in the absence of the candidate compound. The candidate compound can then be identified as a modulator of variant gene expression based on this comparison and be used to treat a disorder such as MI that is characterized by variant gene expression (e.g., either expression of a SNP-containing nucleic acid or altered expression of a normal/wild-type nucleic acid molecule due to one or more SNPs that affect expression of the nucleic acid molecule) due to one or more SNPs of the present invention. When expression of mRNA is statistically significantly greater in the presence of the candidate compound than in its absence, the candidate compound is identified as a stimulator of nucleic acid expression. When nucleic acid expression is statistically significantly less in the presence of the candidate compound than in its absence, the candidate compound is identified as an inhibitor of nucleic acid expression.

[0260] The invention further provides methods of treatment, with the SNP or associated nucleic acid domain (e.g., catalytic domain, ligand/substrate-binding domain, regulatory/control region, etc.) or gene, or the encoded mRNA transcript, as a target, using a compound identified through drug screening as-a gene modulator to modulate variant nucleic acid expression. Modulation can include either up-regulation (i.e., activation or agonization) or down-regulation (i.e., suppression or antagonization) of nucleic acid expression.

[0261] Expression of mRNA transcripts and encoded proteins, either wild type or variant, may be altered in individuals with a particular SNP allele in a regulatory/control element, such as a promoter or transcription factor binding domain, that regulates expression. In this situation, methods of treatment and compounds can be identified, as discussed herein, that regulate or overcome the variant regulatory/control element, thereby generating normal, or healthy, expression levels of either the wild type or variant protein.

[0262] The SNP-containing nucleic acid molecules of the present invention are also useful for monitoring the effectiveness of modulating compounds on the expression or activity of a variant gene, or encoded product, in clinical trials or in a treatment regimen. Thus, the gene expression pattern can serve as an indicator for the continuing effectiveness of treatment with the compound, particularly with compounds to which a patient can develop resistance, as well as an indicator for toxicities. The gene expression pattern can also serve as a marker indicative of a physiological response of the affected cells to the compound. Accordingly, such monitoring would allow either increased administration of the compound or the administration of alternative compounds to which the patient has not become resistant. Similarly, if the level of nucleic acid expression falls below a desirable level, administration of the compound could be commensurately decreased.

[0263] In another aspect of the present invention, there is provided a pharmaceutical pack comprising a therapeutic agent (e.g., a small molecule drug, antibody, peptide, antisense or RNAi nucleic acid molecule, etc.) and a set of instructions for administration of the therapeutic agent to humans diagnostically tested for one or more SNPs or SNP haplotypes provided by the present invention.

[0264] The SNPs/haplotypes of the present invention are also useful for improving many different aspects of the drug development process. For instance, an aspect of the present invention includes selecting individuals for clinical trials based on their SNP genotype. For example, individuals with SNP genotypes that indicate that they are likely to positively respond to a drug can be included in the trials, whereas those individuals whose SNP genotypes indicate that they are less likely to or would not respond to the drug, or who are at risk for suffering-toxic effects or other adverse reactions, can be excluded from the clinical trials. This not only can improve the safety of clinical trials, but also can enhance the chances that the trial will demonstrate statistically significant efficacy. Furthermore, the SNPs of the present invention may explain why certain previously developed drugs performed poorly in clinical trials and may help identify a subset of the population that would benefit from a drug that had previously performed poorly in clinical trials, thereby “rescuing” previously developed drugs, and enabling the drug to be made available to a particular MI patient population that can benefit from it.

[0265] SNPs have many important uses in drug discovery, screening, and development. A high probability exists that, for any gene/protein selected as a potential drug target, variants of that gene/protein will exist in a patient population. Thus, determining the impact of gene/protein variants on the selection and delivery of a therapeutic agent should be an integral aspect of the drug discovery and development process. (Jazwinska, A Trends Guide to Genetic Variation and Genomic Medicine, March 2002; S30-S36).

[0266] Knowledge of variants (e.g., SNPs and any corresponding amino acid polymorphisms) of a particular therapeutic target (e.g., a gene, mRNA transcript, or protein) enables parallel screening of the variants in order to identify therapeutic candidates (e.g., small molecule compounds, antibodies, antisense or RNAi nucleic acid compounds, etc.) that demonstrate efficacy across variants (Rothberg, Nat Biotechnol March 2001;19(3):209-1 1). Such therapeutic candidates would be expected to show equal efficacy across a larger segment of the patient population, thereby leading to a larger potential market for the therapeutic candidate.

[0267] Furthermore, identifying variants of a potential therapeutic target enables the most common form of the target to be used for selection of therapeutic candidates, thereby helping to ensure that the experimental activity that is observed for the selected candidates reflects the real activity expected in the largest proportion of a patient population (Jazwinska, A Trends Guide to Genetic Variation and Genomic Medicine, March 2002; S30-S36).

[0268] Additionally, screening therapeutic candidates against all known variants of a target can enable the early identification of potential toxicities and adverse reactions relating to particular variants. For example, variability in drug absorption, distribution, metabolism and excretion (ADME) caused by, for example, SNPs in therapeutic targets or drug metabolizing genes, can be identified, and this information can be utilized during the drug development process to minimize variability in drug disposition and develop therapeutic agents that are safer across a wider range of a patient population. The SNPs of the present invention, including the variant proteins and encoding polymorphic nucleic acid molecules provided in Tables 1-2, are useful in conjunction with a variety of toxicology methods established in the art, such as those set forth in Current Protocols in Toxicology, John Wiley & Sons, Inc., N.Y.

[0269] Furthermore, therapeutic agents that target any art-known proteins (or nucleic acid molecules, either RNA or DNA) may cross-react with the variant proteins (or polymorphic nucleic acid molecules) disclosed in Table 1, thereby significantly affecting the pharmacokinetic properties of the drug. Consequently, the protein variants and the SNP-containing nucleic acid molecules disclosed in Tables 1-2 are useful in developing, screening, and evaluating therapeutic agents that target corresponding art-known protein forms (or nucleic acid molecules). Additionally, as discussed above, knowledge of all polymorphic forms of a particular drug target enables the design of therapeutic agents that are effective against most or all such polymorphic forms of the drug target.

[0270] Pharmaceutical Compositions and Administration Thereof

[0271] Any of the MI-associated proteins, and encoding nucleic acid molecules, disclosed herein can be used as therapeutic targets (or directly used themselves as therapeutic compounds) for treating MI and related pathologies, and the present disclosure enables therapeutic compounds (e.g., small molecules, antibodies, therapeutic proteins, RNAi and antisense molecules, etc.) to be developed that target (or are comprised of) any of these therapeutic targets.

[0272] In general, a therapeutic compound will be administered in a therapeutically effective amount by any of the accepted modes of administration for agents that serve similar utilities. The actual amount of the therapeutic compound of this invention, i.e., the active ingredient, will depend upon numerous factors such as the severity of the disease to be treated, the age and relative health of the subject, the potency of the compound used, the route and form of administration, and other factors.

[0273] Therapeutically effective amounts of therapeutic compounds may range from, for example, approximately 0.01-50 mg per kilogram body weight of the recipient per day; preferably about 0.1-20 mg/kg/day. Thus, as an example, for administration to a 70 kg person, the dosage range would most preferably be about 7 mg to 1.4 g per day.

[0274] In general, therapeutic compounds will be administered as pharmaceutical compositions by any one of the following routes: oral, systemic (e.g., transdermal, intranasal, or by suppository), or parenteral (e.g., intramuscular, intravenous, or subcutaneous) administration. The preferred manner of administration is oral or parenteral using a convenient daily dosage regimen, which can be adjusted according to the degree of affliction. Oral compositions can take the form of tablets, pills, capsules, semisolids, powders, sustained release formulations, solutions, suspensions, elixirs, aerosols, or any other appropriate compositions.

[0275] The choice of formulation depends on various factors such as the mode of drug administration (e.g., for oral administration, formulations in the form of tablets, pills, or capsules are preferred) and the bioavailability of the drug substance. Recently, pharmaceutical formulations have been developed especially for drugs that show poor bioavailability based upon the principle that bioavailability can be increased by increasing the surface area, i.e., decreasing particle size. For example, U.S. Pat. No. 4,107,288 describes a pharmaceutical formulation having particles in the size range from 10 to 1,000 nm in which the active material is supported on a cross-linked matrix of macromolecules. U.S. Pat. No. 5,145,684 describes the production of a pharmaceutical formulation in which the drug substance is pulverized to nanoparticles (average particle size of 400 mn) in the presence of a surface modifier and then dispersed in a liquid medium to give a pharmaceutical formulation that exhibits remarkably high bioavailability.

[0276] Pharmaceutical compositions are comprised of, in general, a therapeutic compound in combination with at least one pharmaceutically acceptable excipient. Acceptable excipients are non-toxic, aid administration, and do not adversely affect the therapeutic benefit of the therapeutic compound. Such excipients may be any solid, liquid, semi-solid or, in the case of an aerosol composition, gaseous excipient that is generally available to one skilled in the art.

[0277] Solid pharmaceutical excipients include starch, cellulose, talc, glucose, lactose, sucrose, gelatin, malt, rice, flour, chalk, silica gel, magnesium stearate, sodium stearate, glycerol monostearate, sodium chloride, dried skim milk and the like. Liquid and semisolid excipients may be selected from glycerol, propylene glycol, water, ethanol and various oils, including those of petroleum, animal, vegetable or synthetic origin, e.g., peanut oil, soybean oil, mineral oil, sesame oil, etc. Preferred liquid carriers, particularly for injectable solutions, include water, saline, aqueous dextrose, and glycols.

[0278] Compressed gases may be used to disperse a compound of this invention in aerosol form. Inert gases suitable for this purpose are nitrogen, carbon dioxide, etc.

[0279] Other suitable pharmaceutical excipients and their formulations are described in Remington's Pharmaceutical Sciences, edited by E. W. Martin (Mack Publishing Company, 18^{th} ed., 1990).

[0280] The amount of the therapeutic compound in a formulation can vary within the full range employed by those skilled in the art. Typically, the formulation will contain, on a weight percent (wt %) basis, from about 0.01-99.99 wt % of the therapeutic compound based on the total formulation, with the balance being one or more suitable pharmaceutical excipients. Preferably, the compound is present at a level of about 1-80 wt %.

[0281] Therapeutic compounds can be administered alone or in combination with other therapeutic compounds or in combination with one or more other active ingredient(s). For example, an inhibitor or stimulator of an MI-associated protein can be administered in combination with another agent that inhibits or stimulates the activity of the same or a different MI-associated protein to thereby counteract the affects of MI.

[0282] For further information regarding pharmacology, see Current Protocols in Pharmacology, John Wiley & Sons, Inc., N.Y.

[0283] Human Identification Applications

[0284] In addition to their diagnostic and therapeutic uses in MI and related pathologies, the SNPs provided by the present invention are also useful as human identification markers for such applications as forensics, paternity testing, and biometrics (see, e.g., Gill, “An assessment of the utility of single nucleotide polymorphisms (SNPs) for forensic purposes”, Int J Legal Med. 2001;114(4-5):204-10). Genetic variations in the nucleic acid sequences between individuals can be used as genetic markers to identify individuals and to associate a biological sample with an individual. Determination of which nucleotides occupy a set of SNP positions in an individual identifies a set of SNP markers that distinguishes the individual. The more SNP positions that are analyzed, the lower the probability that the set of SNPs in one individual is the same as that in an unrelated individual. Preferably, if multiple sites are analyzed, the sites are unlinked (i.e., inherited independently). Thus, preferred sets of SNPs can be selected from among the SNPs disclosed herein, which may include SNPs on different chromosomes, SNPs on different chromosome arms, and/or SNPs that are dispersed over substantial distances along the same chromosome arm.

[0285] Furthermore, among the SNPs disclosed herein, preferred SNPs for use in certain forensic/human identification applications include SNPs located at degenerate codon positions (i.e., the third position in certain codons which can be one of two or more alternative nucleotides and still encode the same amino acid), since these SNPs do not affect the encoded protein. SNPs that do not affect the encoded protein are expected to be under less selective pressure and are therefore expected to be more polymorphic in a population, which is typically an advantage for forensic/human identification applications. However, for certain forensics/human identification applications, such as predicting phenotypic characteristics (e.g., inferring ancestry or inferring one or more physical characteristics of an individual) from a DNA sample, it may be desirable to utilize SNPs that affect the encoded protein.

[0286] For many of the SNPs disclosed in Tables 1-2 (which are identified as “Applera” SNP source), Tables 1-2 provide SNP allele frequencies obtained by re-sequencing the DNA of chromosomes from 39 individuals (Tables 1-2 also provide allele frequency information for “Celera” source SNPs and, where available, public SNPs from dbEST, HGBASE, and/or HGMD). The allele frequencies provided in Tables 1-2 enable these SNPs to be readily used for human identification applications. Although any SNP disclosed in Table 1 and/or Table 2 could be used for human identification, the closer that the frequency of the minor allele at a particular SNP site is to 50%, the greater the ability of that SNP to discriminate between different individuals in a population since it becomes increasingly likely that two randomly selected individuals would have different alleles at that SNP site. Using the SNP allele frequencies provided in Tables 1-2, one of ordinary skill in the art could readily select a subset of SNPs for which the frequency of the minor allele is, for example, at least 1%, 2%, 5%, 10%, 20%, 25%, 30%, 40%, 45%, or 50%,or any other frequency in-between. Thus, since Tables 1-2 provide allele frequencies based on the re-sequencing of the chromosomes from 39 individuals, a subset of SNPs could readily be selected for human identification in which the total allele count of the minor allele at a particular SNP site is, for example, at least 1, 2, 4, 8, 10, 16, 20, 24, 30, 32, 36, 38, 39, 40, or any other number in-between.

[0287] Furthermore, Tables 1-2 also provide population group (interchangeably referred to herein as ethnic or racial groups) information coupled with the extensive allele frequency information. For example, the group of 39 individuals whose DNA was re-sequenced was made-up of 20 Caucasians and 19 African-Americans. This population group information enables further refinement of SNP selection for human identification. For example, preferred SNPs for human identification can be selected from Tables 1-2 that have similar allele frequencies in both the Caucasian and African-American populations; thus, for example, SNPs can be selected that have equally high discriminatory power in both populations. Alternatively, SNPs can be selected for which there is a statistically significant difference in allele frequencies between the Caucasian and African-American populations (as an extreme example, a particular allele may be observed only in either the Caucasian or the African-American population group but not observed in the other population group); such SNPs are useful, for example, for predicting the race/ethnicity of an unknown perpetrator from a biological sample such as a hair or blood stain recovered at a crime scene. For a discussion of using SNPs to predict ancestry from a DNA sample, including statistical methods, see Frudakis et al., “A Classifier for the SNP-Based Inference of Ancestry”, Journal of Forensic Sciences 2003; 48(4):771-782.

[0288] SNPs have numerous advantages over other types of polymorphic markers, such as short tandem repeats (STRs). For example, SNPs can be easily scored and are amenable to automation, making SNPs the markers of choice for large-scale forensic databases. SNPs are found in much greater abundance throughout the genome than repeat polymorphisms. Population frequencies of two polymorphic forms can usually be determined with greater accuracy than those of multiple polymorphic forms at multi-allelic loci. SNPs are mutationaly more stable than repeat polymorphisms. SNPs are not susceptible to artifacts such as stutter bands that can hinder analysis. Stutter bands are frequently encountered when analyzing repeat polymorphisms, and are particularly troublesome when analyzing samples such as crime scene samples that may contain mixtures of DNA from multiple sources. Another significant advantage of SNP markers over STR markers is the much shorter length of nucleic acid needed to score a SNP. For example, STR markers are generally several hundred base pairs in length. A SNP, on the other hand, comprises a single nucleotide, and generally a short conserved region on either side of the SNP position for primer and/or probe binding. This makes SNPs more amenable to typing in highly degraded or aged biological samples that are frequently encountered in forensic casework in which DNA may be fragmented into short pieces.

[0289] SNPs also are not subject to microvariant and “off-ladder” alleles frequently encountered when analyzing STR loci. Microvariants are deletions or insertions within a repeat unit that change the size of the amplified DNA product so that the amplified product does not migrate at the same rate as reference alleles with normal sized repeat units. When separated by size, such as by electrophoresis on a polyacrylamide gel, microvariants do not align with a reference allelic ladder of standard sized repeat units, but rather migrate between the reference alleles. The reference allelic ladder is used for precise sizing of alleles for allele classification; therefore alleles that do not align with the reference allelic ladder lead to substantial analysis problems. Furthermore, when analyzing multi-allelic repeat polymorphisms, occasionally an allele is found that consists of more or less repeat units than has been previously seen in the population, or more or less repeat alleles than are included in a reference allelic ladder. These alleles will migrate outside the size range of known alleles in a reference allelic ladder, and therefore are referred to as “off-ladder” alleles. In extreme cases, the allele may contain so few or so many repeats that it migrates well out of the range of the reference allelic ladder. In this situation, the allele may not even be observed, or, with multiplex analysis, it may migrate within or close to the size range for another locus, further confounding analysis.

[0290] SNP analysis avoids the problems of microvariants and off-ladder alleles encountered in STR analysis. Importantly, microvariants and off-ladder alleles may provide significant problems, and may be completely missed, when using analysis methods such as oligonucleotide hybridization arrays, which utilize oligonucleotide probes specific for certain known alleles. Furthermore, off-ladder alleles and microvariants encountered with STR analysis, even when correctly typed, may lead to improper statistical analysis, since their frequencies in the population are generally unknown or poorly characterized, and therefore the statistical significance of a matching genotype may be questionable. All these advantages of SNP analysis are considerable in light of the consequences of most DNA identification cases, which may lead to life imprisonment for an individual, or re-association of remains to the family of a deceased individual.

[0291] DNA can be isolated from biological samples such as blood, bone, hair, saliva, or semen, and compared with the DNA from a reference source at particular SNP positions. Multiple SNP markers can be assayed simultaneously in order to increase the power of discrimination and the statistical significance of a matching genotype. For example, oligonucleotide arrays can be used to genotype a large number of SNPs simultaneously. The SNPs provided by the present invention can be assayed in combination with other polymorphic genetic markers, such as other SNPs known in the art or STRs, in order to identify an individual or to associate an individual with a particular biological sample.

[0292] Furthermore, the SNPs provided by the present invention can be genotyped for inclusion in a database of DNA genotypes, for example, a criminal DNA databank such as the FBI's Combined DNA Index System (CODIS) database. A genotype obtained from a biological sample of unknown source can then be queried against the database to find a matching genotype, with the SNPs of the present invention providing nucleotide positions at which to compare the known and unknown DNA sequences for identity. Accordingly, the present invention provides a database comprising novel SNPs or SNP alleles of the present invention (e.g., the database can comprise information indicating which alleles are possessed by individual members of a population at one or more novel SNP sites of the present invention), such as for use in forensics, biometrics, or other human identification applications. Such a database typically comprises a computer-based system in which the SNPs or SNP alleles of the present invention are recorded on a computer readable medium (see the section of the present specification entitled “Computer-Related Embodiments”).

[0293] The SNPs of the present invention can also be assayed for use in paternity testing. The object of paternity testing is usually to determine whether a male is the father of a child. In most cases, the mother of the child is known and thus, the mother's contribution to the child's genotype can be traced. Paternity testing investigates whether the part of the child's genotype not attributable to the mother is consistent with that of the putative father. Paternity testing can be performed by analyzing sets of polymorphisms in the putative father and the child, with the SNPs of the present invention providing nucleotide positions at which to compare the putative father's and child's DNA sequences for identity. If the set of polymorphisms in the child attributable to the father does not match the set of polymorphisms of the putative father, it can be concluded, barring experimental error, that the putative father is not the father of the child. If the set of polymorphisms in the child attributable to the father match the set of polymorphisms of the putative father, a statistical calculation can be performed to determine the probability of coincidental match, and a conclusion drawn as to the likelihood that the putative father is the true biological father of the child.

[0294] In addition to paternity testing, SNPs are also useful for other types of kinship testing, such as for verifying familial relationships for immigration purposes, or for cases in which an individual alleges to be related to a deceased individual in order to claim an inheritance from the deceased individual, etc. For further information regarding the utility of SNPs for paternity testing and other types of kinship testing, including methods for statistical analysis, see Krawczak, “Informativity assessment for biallelic single nucleotide polymorphisms”, Electrophoresis June 1999;20(8):1676-81.

[0295] The use of the SNPs of the present invention for human identification further extends to various authentication systems, commonly referred to as biometric systems, which typically convert physical characteristics of humans (or other organisms) into digital data. Biometric systems include various technological devices that measure such unique anatomical or physiological characteristics as finger, thumb, or palm prints; hand geometry; vein patterning on the back of the hand; blood vessel patterning of the retina and color and texture of the iris; facial characteristics; voice patterns; signature and typing dynamics; and DNA. Such physiological measurements can be used to verify identity and, for example, restrict or allow access based on the identification. Examples of applications for biometrics include physical area security, computer and network security, aircraft passenger check-in and boarding, financial transactions, medical records access, government benefit distribution, voting, law enforcement, passports, visas and immigration, prisons, various military applications, and for restricting access to expensive or dangerous items, such as automobiles or guns (see, for example, O'Connor, Stanford Technology Law Review and U.S. Pat. No. 6,119,096).

[0296] Groups of SNPs, particularly the SNPs provided by the present invention, can be typed to uniquely identify an individual for biometric applications such as those described above. Such SNP typing can readily be accomplished using, for example, DNA chips/arrays. Preferably, a minimally invasive means for obtaining a DNA sample is utilized. For example, PCR amplification enables sufficient quantities of DNA for analysis to be obtained from buccal swabs or fingerprints, which contain DNA-containing skin cells and oils that are naturally transferred during contact.

[0297] Further information regarding techniques for using SNPs in forensic/human identification applications can be found in, for example, Current Protocols in Human Genetics, John Wiley & Sons, N.Y. (2002), 14.1-14.7.

[0298] Variant Proteins, Antibodies, Vectors & Host Cells, & Uses Thereof

[0299] Variant Proteins Encoded by SNP-Containing Nucleic Acid Molecules

[0300] The present invention provides SNP-containing nucleic acid molecules, many of which encode proteins having variant amino acid sequences as compared to the art-known (i.e., wild-type) proteins. Amino acid sequences encoded by the polymorphic nucleic acid molecules of the present invention are provided as SEQ ID NOS: 127-252 in Table 1 and the Sequence Listing. These variants will generally be referred to herein as variant proteins/peptides/polypeptides, or polymorphic proteins/peptides/polypeptides of the present invention. The terms “protein”, “peptide”, and “polypeptide” are used herein interchangeably.

[0301] A variant protein of the present invention may be encoded by, for example, a nonsynonymous nucleotide substitution at any one of the cSNP positions disclosed herein. In addition, variant proteins may also include proteins whose expression, structure, and/or function is altered by a SNP disclosed herein, such as a SNP that creates or destroys a stop codon, a SNP that affects splicing, and a SNP in control/regulatory elements, e.g. promoters, enhancers, or transcription factor binding domains.

[0302] As used herein, a protein or peptide is said to be “isolated” or “purified” when it is substantially free of cellular material or chemical precursors or other chemicals. The variant proteins of the present invention can be purified to homogeneity or other lower degrees of purity. The level of purification will be based on the intended use. The key feature is that the preparation allows for the desired function of the variant protein, even if in the presence of considerable amounts of other components.

[0303] As used herein, “substantially free of cellular material” includes preparations of the variant protein having less than about 30% (by dry weight) other proteins (i.e., contaminating protein), less than about 20% other proteins, less than about 10% other proteins, or less than about 5% other proteins. When the variant protein is recombinantly produced, it can also be substantially free of culture medium, i.e., culture medium represents less than about 20% of the volume of the protein preparation.

[0304] The language “substantially free of chemical precursors or other chemicals” includes preparations of the variant protein in which it is separated from chemical precursors or other chemicals that are involved in its synthesis. In one embodiment, the language “substantially free of chemical precursors or other chemicals” includes preparations of the variant protein having less than about 30% (by dry weight) chemical precursors or other chemicals, less than about 20% chemical precursors or other chemicals, less than about 10% chemical precursors or other chemicals, or less than about 5% chemical precursors or other chemicals.

[0305] An isolated variant protein may be purified from cells that naturally express it, purified from cells that have been altered to express it (recombinant host cells), or synthesized using known protein synthesis methods. For example, a nucleic acid molecule containing SNP(s) encoding the variant protein can be cloned into an expression vector, the expression vector introduced into a host cell, and the variant protein expressed in the host cell. The variant protein can then be isolated from the cells by any appropriate purification scheme using standard protein purification techniques. Examples of these techniques are described in detail below (Sambrook and Russell, 2000, Molecular Cloning: A Laboratory Manual, Cold Spring Harbor Laboratory Press, Cold Spring Harbor, N.Y.).

[0306] The present invention provides isolated variant proteins that comprise, consist of or consist essentially of amino acid sequences that contain one or more variant amino acids encoded by one or more codons that contain a SNP of the present invention.

[0307] Accordingly, the present invention provides variant proteins that consist of amino acid sequences that contain one or more amino acid polymorphisms (or truncations or extensions due to creation or destruction of a stop codon, respectively) encoded by the SNPs provided in Table 1 and/or Table 2. A protein consists of an amino acid sequence when the amino acid sequence is the entire amino acid sequence of the protein.

[0308] The present invention further provides variant proteins that consist essentially of amino acid sequences that contain one or more amino acid polymorphisms (or truncations or extensions due to creation or destruction of a stop codon, respectively) encoded by the SNPs provided in Table 1 and/or Table 2. A protein consists essentially of an amino acid sequence when such an amino acid sequence is present with only a few additional amino acid residues in the final protein.

[0309] The present invention further provides variant proteins that comprise amino acid sequences that contain one or more amino acid polymorphisms (or truncations or extensions due to creation or destruction of a stop codon, respectively) encoded by the SNPs provided in Table 1 and/or Table 2. A protein comprises an amino acid sequence when the amino acid sequence is at least part of the final amino acid sequence of the protein. In such a fashion, the protein may contain only the variant amino acid sequence or have additional amino acid residues, such as a contiguous encoded sequence that is naturally associated with it or heterologous amino acid residues. Such a protein can have a few additional amino acid residues or can comprise many more additional amino acids. A brief description of how various types of these proteins can be made and isolated is provided below.

[0310] The variant proteins of the present invention can be attached to heterologous sequences to form chimeric or fusion proteins. Such chimeric and fusion proteins comprise a variant protein operatively linked to a heterologous protein having an amino acid sequence not substantially homologous to the variant protein. “Operatively linked” indicates that the coding sequences for the variant protein and the heterologous protein are ligated in-frame. The heterologous protein can be fused to the N-terminus or C-terminus of the variant protein. In another embodiment, the fusion protein is encoded by a fusion polynucleotide that is synthesized by conventional techniques including automated DNA synthesizers. Alternatively, PCR amplification of gene fragments can be carried out using anchor primers which give rise to complementary overhangs between two consecutive gene fragments which can subsequently be annealed and re-amplified to generate a chimeric gene sequence (see Ausubel et al., Current Protocols in Molecular Biology, 1992). Moreover, many expression vectors are commercially available that already encode a fusion moiety (e.g., a GST protein). A variant protein-encoding nucleic acid can be cloned into such an expression vector such that the fusion moiety is linked in-frame to the variant protein.

[0311] In many uses, the fusion protein does not affect the activity of the variant protein. The fusion protein can include, but is not limited to, enzymatic fusion proteins, for example, beta-galactosidase fusions, yeast two-hybrid GAL fusions, poly-His fusions, MYC-tagged, HI-tagged and Ig fusions. Such fusion proteins, particularly poly-His fusions, can facilitate their purification following recombinant expression. In certain host cells (e.g., mammalian host cells), expression and/or secretion of a protein can be increased by using a heterologous signal sequence. Fusion proteins are further described in, for example, Terpe, “Overview of tag protein fusions: from molecular and biochemical fundamentals to commercial systems”, Appl Microbiol Biotechnol. January 2003;60(5):523-33. Epub Nov. 7, 2002; Graddis et al., “Designing proteins that work using recombinant technologies”, Curr Pharm Biotechnol. December 2002;3(4):285-97; and Nilsson et al., “Affinity fusion strategies for detection, purification, and immobilization of recombinant proteins”, Protein Expr Purif. October 1997; ;11(1):1-16.

[0312] The present invention also relates to further obvious variants of the variant polypeptides of the present invention, such as naturally-occurring mature forms (e.g., alleleic variants), non-naturally occurring recombinantly-derived variants, and orthologs and paralogs of such proteins that share sequence homology. Such variants can readily be generated using art-known techniques in the fields of recombinant nucleic acid technology and protein biochemistry. It is understood, however, that variants exclude those known in the prior art before the present invention.

[0313] Further variants of the variant polypeptides disclosed in Table 1 can comprise an amino acid sequence that shares at least 70-80%, 80-85%, 85-90%, 91%, 92%, 93%, 94%, 95%, 96%, 97%, 98%, or 99% sequence identity with an amino acid sequence disclosed in Table 1 (or a fragment thereof) and that includes a novel amino acid residue (allele) disclosed in Table 1 (which is encoded by a novel SNP allele). Thus, an aspect of the present invention that is specifically contemplated are polypeptides that have a certain degree of sequence variation compared with the polypeptide sequences shown in Table 1, but that contain a novel amino acid residue (allele) encoded by a novel SNP allele disclosed herein. In other words, as long as a polypeptide contains a novel amino acid residue disclosed herein, other portions of the polypeptide that flank the novel amino acid residue can vary to some degree from the polypeptide sequences shown in Table 1.

[0314] Full-length pre-processed forms, as well as mature processed forms, of proteins that comprise one of the amino acid sequences disclosed herein can readily be identified as having complete sequence identity to one of the variant proteins of the present invention as well as being encoded by the same genetic locus as the variant proteins provided herein.

[0315] Orthologs of a variant peptide can readily be identified as having some degree of significant sequence homology/identity to at least a portion of a variant peptide as well as being encoded by a gene from another organism. Preferred orthologs will be isolated from non-human mammals, preferably primates, for the development of human therapeutic targets and agents. Such orthologs can be encoded by a nucleic acid sequence that hybridizes to a variant peptide-encoding nucleic acid molecule under moderate to stringent conditions depending on the degree of relatedness of the two organisms yielding the homologous proteins.

[0316] Variant proteins include, but are not limited to, proteins containing deletions, additions and substitutions in the amino acid sequence caused by the SNPs of the present invention. One class of substitutions is conserved amino acid substitutions in which a given amino acid in a polypeptide is substituted for another amino acid of like characteristics. Typical conservative substitutions are replacements, one for another, among the aliphatic amino acids Ala, Val, Leu, and Ile; interchange of the hydroxyl residues Ser and Thr; exchange of the acidic residues Asp and Glu; substitution between the amide residues Asn and Gln; exchange of the basic residues Lys and Arg; and replacements among the aromatic residues Phe and Tyr. Guidance concerning which amino acid changes are likely to be phenotypically silent are found in, for example, Bowie et al., Science 247:1306-1310 (1990).

[0317] Variant proteins can be fully functional or can lack function in one or more activities, e.g. ability to bind another molecule, ability to catalyze a substrate, ability to mediate signaling, etc. Fully functional variants typically contain only conservative variations or variations in non-critical residues or in non-critical regions. Functional variants can also contain substitution of similar amino acids that result in no change or an insignificant change in function. Alternatively, such substitutions may positively or negatively affect function to some degree. Non-functional variants typically contain one or more non-conservative amino acid substitutions, deletions, insertions, inversions, truncations or extensions, or a substitution, insertion, inversion, or deletion of a critical residue or in a critical region.

[0318] Amino acids that are essential for function of a protein can be identified by methods known in the art, such as site-directed mutagenesis or alanine-scanning mutagenesis (Cunningham et al., Science 244:1081-1085 (1989)), particularly using the amino acid sequence and polymorphism information provided in Table 1. The latter procedure introduces single alanine mutations at every residue in the molecule. The resulting mutant molecules are then tested for biological activity such as enzyme activity or in assays such as an in vitro proliferative activity. Sites that are critical for binding partner/substrate binding can also be determined by structural analysis such as crystallization, nuclear magnetic resonance or photoaffinity labeling (Smith et al., J. Mol. Biol. 224:899-904 (1992); de Vos et al. Science 255:306-312 (1992)).

[0319] Polypeptides can contain amino acids other than the 20 amino acids commonly referred to as the 20 naturally occurring amino acids. Further, many amino acids, including the terminal amino acids, may be modified by natural processes, such as processing and other post-translational modifications, or by chemical modification techniques well known in the art. Accordingly, the variant proteins of the present invention also encompass derivatives or analogs in which a substituted amino acid residue is not one encoded by the genetic code, in which a substituent group is included, in which the mature polypeptide is fused with another compound, such as a compound to increase the half-life of the polyp eptide (e.g., polyethylene glycol), or in which additional amino acids are fuised to the mature polypeptide, such as a leader or secretory sequence or a sequence for purification of the mature polypeptide or a pro-protein sequence.

[0320] Known protein modifications include, but are not limited to, acetylation, acylation, ADP-ribosylation, amidation, covalent attachment of flavin, covalent attachment of a heme moiety, covalent attachment of a nucleotide or nucleotide derivative, covalent attachment of a lipid or lipid derivative, covalent attachment of phosphotidylinositol, cross-linking, cyclization, disulfide bond formation, demethylation, formation of covalent crosslinks, formation of cystine, formation of pyroglutamate, formylation, gamma carboxylation, glycosylation, GPI anchor formation, hydroxylation, iodination, methylation, myristoylation, oxidation, proteolytic processing, phosphorylation, prenylation, racemization, selenoylation, sulfation, transfer-RNA mediated addition of amino acids to proteins such as arginylation, and ubiquitination.

[0321] Such protein modifications are well known to those of skill in the art and have been described in great detail in the scientific literature. Several particularly common modifications, glycosylation, lipid attachment, sulfation, gamma-carboxylation of glutamic acid residues, hydroxylation and ADP-ribosylation, for instance, are described in most basic texts, such as Proteins—Structure and Molecular Properties, 2nd Ed., T. E. Creighton, W. H. Freeman and Company, New York (1993); Wold, F., Posttranslational Covalent Modification of Proteins, B. C. Johnson, Ed., Academic Press, New York 1-12 (1983); Seifter et al., Meth. Enzymol. 182: 626-646 (1990); and Rattan et al., Ann. N. Y. Acad. Sci. 663:48-62 (1992).

[0322] The present invention further provides fragments of the variant proteins in which the fragments contain one or more amino acid sequence variations (e.g., substitutions, or truncations or extensions-due to creation or destruction of a stop codon) encoded by one or more SNPs disclosed herein. The fragments to which the invention pertains, however, are not to be construed as encompassing fragments that have been disclosed in the prior art before the present invention.

[0323] As used herein, a fragment may comprise at least about 4, 8, 10, 12, 14, 16, 18, 20, 25, 30, 50, 100 (or any other number in-between) or more contiguous amino acid residues from a variant protein, wherein at least one amino acid residue is affected by a SNP of the present invention, e.g., a variant amino acid residue encoded by a nonsynonymous nucleotide substitution at a cSNP position provided by the present invention. The variant amino acid encoded by a cSNP may occupy any residue position along the sequence of the fragment. Such fragments can be chosen based on the ability to retain one or more of the biological activities of the variant protein or the ability to perform a function, e.g., act as an immunogen. Particularly important fragments are biologically active fragments. Such fragments will typically comprise a domain or motif of a variant protein of the present invention, e.g., active site, transmembrane domain, or ligand/substrate binding domain.

[0324] Other fragments include, but are not limited to, domain or motif-containing fragments, soluble peptide fragments, and fragments containing immunogenic structures. Predicted domains and functional sites are readily identifiable by computer programs well known to those of skill in the art (e.g., PROSITE analysis) (Current Protocols in Protein Science, John Wiley & Sons, N.Y. (2002)).

[0325] Uses of Variant Proteins

[0326] The variant proteins of the present invention can be used in a variety of ways, including but not limited to, in assays to determine the biological activity of a variant protein, such as in a panel of multiple proteins for high-throughput screening; to raise antibodies or to elicit another type of immune response; as a reagent (including the labeled reagent) in assays designed to quantitatively determine levels of the variant protein (or its binding partner) in biological fluids; as a marker for cells or tissues in which it is preferentially expressed (either constitutively or at a particular stage of tissue differentiation or development or in a disease state); as a target for screening for a therapeutic agent; and as a direct therapeutic agent to be administered into a human subject. Any of the variant proteins disclosed herein may be developed into reagent grade or kit format for commercialization as research products. Methods for performing the uses listed above are well known to those skilled in the art (see, e.g., Molecular Cloning: A Laboratory Manual, Cold Spring Harbor Laboratory Press, Sambrook and Russell, 2000, and Methods in Enzymology: Guide to Molecular Cloning Techniques, Academic Press, Berger, S. L. and A. R. Kimmel eds., 1987).

[0327] In a specific embodiment of the invention, the methods of the present invention include detection of one or more variant proteins disclosed herein. Variant proteins are disclosed in Table 1 and in the Sequence Listing as SEQ ID NOS: 127-252. Detection of such proteins can be accomplished using, for example, antibodies, small molecule compounds, aptamers, ligands/substrates, other proteins or protein fragments, or other protein-binding agents. Preferably, protein detection agents are specific for a variant protein of the present invention and can therefore discriminate between a variant protein of the present invention and the wild-type protein or another variant form. This can generally be accomplished by, for example, selecting or designing detection agents that bind to the region of a protein that differs between the variant and wild-type protein, such as a region of a protein that contains one or more amino acid substitutions that is/are encoded by a non-synonymous cSNP of the present invention, or a region of a protein that follows a nonsense mutation-type SNP that creates a stop codon thereby leading to a shorter polypeptide, or a region of a protein that follows a read-through mutation-type SNP that destroys a stop codon thereby leading to a longer polypeptide in which a portion of the polypeptide is present in one version of the polypeptide but not the other.

[0328] In another specific aspect of the invention, the variant proteins of the present invention are used as targets for diagnosing MI or for determining predisposition to MI in a human. Accordingly, the invention provides methods for detecting the presence of, or levels of, one or more variant proteins of the present invention in a cell, tissue, or organism. Such methods typically involve contacting a test sample with an agent (e.g., an antibody, small molecule compound, or peptide) capable of interacting with the variant protein such that specific binding of the agent to the variant protein can be detected. Such an assay can be provided in a single detection format or a multi-detection format such as an array, for example, an antibody or aptamer array (arrays for protein detection may also be referred to as “protein chips”). The variant protein of interest can be isolated from a test sample and assayed for the presence of a variant amino acid sequence encoded by one or more SNPs disclosed by the present invention. The SNPs may cause changes to the protein and the corresponding protein function/activity, such as through non-synonymous substitutions in protein coding regions that can lead to amino acid substitutions, deletions, insertions, and/or rearrangements; formation or destruction of stop codons; or alteration of control elements such as promoters. SNPs may also cause inappropriate post-translational modifications.

[0329] One preferred agent for detecting a variant protein in a sample is an antibody capable of selectively binding to a variant form of the protein (antibodies are described in greater detail in the next section). Such samples include, for example, tissues, cells, and biological fluids isolated from a subject, as well as tissues, cells and fluids present within a subject.

[0330] In vitro methods for detection of the variant proteins associated with MI that are disclosed herein and fragments thereof include, but are not limited to, enzyme linked immunosorbent assays (ELISAs), radioimmunoassays (RIA), Western blots, immunoprecipitations, immunofluorescence, and protein arrays/chips (e.g., arrays of antibodies or aptamers). For further information regarding immunoassays and related protein detection methods, see Current Protocols in Immunology, John Wiley & Sons, N.Y., and Hage, “Immunoassays”, Anal Chem. Jun. 15, 1999;71(12):294R-304R.

[0331] Additional analytic methods of detecting amino acid variants include, but are not limited to, altered electrophoretic mobility, altered tryptic peptide digest, altered protein activity in cell-based or cell-free assay, alteration in ligand or antibody-binding pattern, altered isoelectric point, and direct amino acid sequencing.

[0332] Alternatively, variant proteins can be detected in vivo in a subject by introducing into the subject a labeled antibody (or other type of detection reagent) specific for a variant protein. For example, the antibody can be labeled with a radioactive marker whose presence and location in a subject can be detected by standard imaging techniques.

[0333] Other uses of the variant peptides of the present invention are based on the class or action of the protein. For example, proteins isolated from humans and their mammalian orthologs serve as targets for identifying agents (e.g., small molecule drugs or antibodies) for use in therapeutic applications, particularly for modulating a biological or pathological response in a cell or tissue that expresses the protein. Pharmaceutical agents can be developed that modulate protein activity.

[0334] As an alternative to modulating gene expression, therapeutic compounds can be developed that modulate protein function. For example, many SNPs disclosed herein affect the amino acid sequence of the encoded protein (e.g., non-synonymous cSNPs and nonsense mutation-type SNPs). Such alterations in the encoded amino acid sequence may affect protein function, particularly if such amino acid sequence variations occur in functional protein domains, such as catalytic domains, ATP-binding domains, or ligand/substrate binding domains. It is well established in the art that variant proteins having amino acid sequence variations in functional domains can cause or influence pathological conditions. In such instances, compounds (e.g., small molecule drugs or antibodies) can be developed that target the variant protein and modulate (e.g., up- or down-regulate) protein function/activity.

[0335] The therapeutic methods of the present invention further include methods that target one or more variant proteins of the present invention. Variant proteins can be targeted using, for example, small molecule compounds, antibodies, aptamers, ligands/substrates, other proteins, or other protein-binding agents. Additionally, the skilled artisan will recognize that the novel protein variants (and polymorphic nucleic acid molecules) disclosed in Table 1 may themselves be directly used as therapeutic agents by acting as competitive inhibitors of corresponding art-known proteins (or nucleic acid molecules such as mRNA molecules).

[0336] The variant proteins of the present invention are particularly useful in drug screening assays, in cell-based or cell-free systems. Cell-based systems can utilize cells that naturally express the protein, a biopsy specimen, or cell cultures. In one embodiment, cell-based assays involve recombinant host cells expressing the variant protein. Cell-free assays can be used to detect the ability of a compound to directly bind to a variant protein or to the corresponding SNP-containing nucleic acid fragment that encodes the variant protein.

[0337] A variant protein of the present invention, as well as appropriate fragments thereof, can be used in high-throughput screening assays to test candidate compounds for the ability to bind and/or modulate the activity of the variant protein. These candidate compounds can be further screened against a protein having normal function (e.g., a wild-type/non-variant protein) to further determine the effect of the compound on the protein activity. Furthermore, these compounds can be tested in animal or invertebrate systems to determine in vivo activity/effectiveness. Compounds can be identified that activate (agonists) or inactivate (antagonists) the variant protein, and different compounds can be identified that cause various degrees of activation or inactivation of the variant protein.

[0338] Further, the variant proteins can be used to screen a compound for the ability to stimulate or inhibit interaction between the variant protein and a target molecule that normally interacts with the protein. The target can be a ligand, a substrate or a binding partner that the protein normally interacts with (for example, epinephrine or norepinephrine). Such assays typically include the steps of combining the variant protein with a candidate compound under conditions that allow the variant protein, or fragment thereof, to interact with the target molecule, and to detect the formation of a complex between the protein and the target or to detect the biochemical consequence of the interaction with the variant protein and the target, such as any of the associated effects of signal transduction.

[0339] Candidate compounds include, for example, 1) peptides such as soluble peptides, including Ig-tailed fusion peptides and members of random peptide libraries (see, e.g. Lam et al., Nature 354:82-84 (1991); Houghten et al., Nature 354:84-86 (1991)) and combinatorial chemistry-derived molecular libraries made of D- and/or L-configuration amino acids; 2) phosphopeptides (e.g., members of random and partially degenerate, directed phosphopeptide libraries, see, e.g., Songyang et al., Cell 72:767-778 (1993)); 3) antibodies (e.g., polyclonal, monoclonal, humanized, anti-idiotypic, chimeric, and single chain antibodies as well as Fab, F(ab′)₂, Fab expression library fragments, and epitope-binding fragments of antibodies); and 4) small organic and inorganic molecules (e.g., molecules obtained from combinatorial and natural product libraries).

[0340] One candidate compound is a soluble fragment of the variant protein that competes for ligand binding. Other candidate compounds include mutant proteins or appropriate fragments containing mutations that affect variant protein function and thus compete for ligand. Accordingly, a fragment that competes for ligand, for example with a higher affinity, or a fragment that binds ligand but does not allow release, is encompassed by the invention.

[0341] The invention further includes other end point assays to identify compounds that modulate (stimulate or inhibit) variant protein activity. The assays typically involve an assay of events in the signal transduction pathway that indicate protein activity. Thus, the expression of genes that are up or down-regulated in response to the variant protein dependent signal cascade can be assayed. In one embodiment, the regulatory region of such genes can be operably linked to a marker that is easily detectable, such as luciferase. Alternatively, phosphorylation of the variant protein, or a variant protein target, could also be measured. Any of the biological or biochemical functions mediated by the variant protein can be used as an endpoint assay. These include all of the biochemical or biological events described herein, in the references cited herein, incorporated by reference for these endpoint assay targets, and other functions known to those of ordinary skill in the art.

[0342] Binding and/or activating compounds can also be screened by using chimeric variant proteins in which an amino terminal extracellular domain or parts thereof, an entire transmembrane domain or subregions, and/or the carboxyl terminal intracellular domain or parts thereof, can be replaced by heterologous domains or subregions. For example, a substrate-binding region can be used that interacts with a different substrate than that which is normally recognized by a variant protein. Accordingly, a different set of signal transduction components is available as an end-point assay for activation. This allows for assays to be performed in other than the specific host cell from which the variant protein is derived.

[0343] The variant proteins are also useful in competition binding assays in methods designed to discover compounds that interact with the variant protein. Thus, a compound can be exposed to a variant protein under conditions that allow the compound to bind or to otherwise interact with the variant protein. A binding partner, such as ligand, that normally interacts with the variant protein is also added to the mixture. If the test compound interacts with the variant protein or its binding partner, it decreases the amount of complex formed or activity from the variant protein. This type of assay is particularly useful in screening for compounds that interact with specific regions of the variant protein (Hodgson, Bio/technology, Sep. 10, 1992, (9), 973-80).

[0344] To perform cell-free drug screening assays, it is sometimes desirable to immobilize either the variant protein or a fragment thereof, or its target molecule, to facilitate separation of complexes from uncomplexed forms of one or both of the proteins, as well as to accommodate automation of the assay. Any method for immobilizing proteins on matrices can be used in drug screening assays. In one embodiment, a fusion protein containing an added domain allows the protein to be bound to a matrix. For example, glutathione-S-transferase/¹²⁵, fusion proteins can be adsorbed onto glutathione sepharose beads (Sigma Chemical, St. Louis, Mo.) or glutathione derivatized microtitre plates, which are then combined with the cell lysates (e.g., ³⁵S-labeled) and a candidate compound, such as a drug candidate, and the mixture incubated under conditions conducive to complex formation (e.g., at physiological conditions for salt and pH). Following incubation, the beads can be washed to remove any unbound label, and the matrix immobilized and radiolabel determined directly, or in the supernatant after the complexes are dissociated. Alternatively, the complexes can be dissociated from the matrix, separated by SDS-PAGE, and the level of bound material found in the bead fraction quantitated from the gel using standard electrophoretic techniques.

[0345] Either the variant protein or its target molecule can be immobilized utilizing conjugation of biotin and streptavidin. Alternatively, antibodies reactive with the variant protein but which do not interfere with binding of the variant protein to its target molecule can be derivatized to the wells of the plate, and the variant protein trapped in the wells by antibody conjugation. Preparations of the target molecule and a candidate compound are incubated in the variant protein-presenting wells and the amount of complex trapped in the well can be quantitated. Methods for detecting such complexes, in addition to those described above for the GST-immobilized complexes, include immunodetection of complexes using antibodies reactive with the protein target molecule, or which are reactive with variant protein and compete with the target molecule, and enzyme-linked assays that rely on detecting an enzymatic activity associated with the target molecule.

[0346] Modulators of variant protein activity identified according to these drug screening assays can be used to treat a subject with a disorder mediated by the protein pathway, such as MI. These methods of treatment typically include the steps of administering the modulators of protein activity in a pharmaceutical composition to a subject in need of such treatment.

[0347] The variant proteins, or fragments thereof, disclosed herein can themselves be directly used to treat a disorder characterized by an absence of, inappropriate, or unwanted expression or activity of the variant protein. Accordingly, methods for treatment include the use of a variant protein disclosed herein or fragments thereof.

[0348] In yet another aspect of the invention, variant proteins can be used as “bait proteins” in a two-hybrid assay or three-hybrid assay (see, e.g., U.S. Pat. No. 5,283,317; Zervos et al. (1993) Cell 72:223-232; Madura et al. (1993) J. Biol. Chem. 20 268:12046-12054; Bartel et al. (1993) Biotechniques 14:920-924; Iwabuchi et al. (1993) Oncogene 8:1693-1696; and Brent WO94/10300) to identify other proteins that bind to or interact with the variant protein and are involved in variant protein activity. Such variant protein-binding proteins are also likely to be involved in the propagation of signals by the variant proteins or variant protein targets as, for example, elements of a protein-mediated signaling pathway. Alternatively, such variant protein-binding proteins are inhibitors of the variant protein.

[0349] The two-hybrid system is based on the modular nature of most transcription factors, which typically consist of separable DNA-binding and activation domains. Briefly, the assay typically utilizes two different DNA constructs. In one construct, the gene that codes for a variant protein is fused to a gene encoding the DNA binding domain of a known transcription factor (e.g., GAL-4). In the other construct, a DNA sequence, from a library of DNA sequences, that encodes an unidentified protein (“prey” or “sample”) is fused to a gene that codes for the activation domain of the known transcription factor. If the “bait” and the “prey” proteins are able to interact, in vivo, forming a variant protein-dependent complex, the DNA-binding and activation domains of the transcription factor are brought into close proximity. This proximity allows transcription of a reporter gene (e.g., LacZ) that is operably linked to a transcriptional regulatory site responsive to the transcription factor. Expression of the reporter gene can be detected, and cell colonies containing the functional transcription factor can be isolated and used to obtain the cloned gene that encodes the protein that interacts with the variant protein.

[0350] Antibodies Directed to Variant Proteins

[0351] The present invention also provides antibodies that selectively bind to the variant proteins disclosed herein and fragments thereof. Such antibodies may be used to quantitatively or qualitatively detect the variant proteins of the present invention. As used herein, an antibody selectively binds a target variant protein when it binds the variant protein and does not significantly bind to non-variant proteins, i.e., the antibody does not significantly bind to normal, wild-type, or art-known proteins that do not contain a variant amino acid sequence due to one or more SNPs of the present invention (variant amino acid sequences may be due to, for example, nonsynonymous cSNPs, nonsense SNPs that create a stop codon, thereby causing a truncation of a polypeptide or SNPs that cause read-through mutations resulting in an extension of a polypeptide).

[0352] As used herein, an antibody is defined in terms consistent with that recognized in the art: they are multi-subunit proteins produced by an organism in response to an antigen challenge. The antibodies of the present invention include both monoclonal antibodies and polyclonal antibodies, as well as antigen-reactive proteolytic fragments of such antibodies, such as Fab, F(ab)′₂, and Fv fragments. In addition, an antibody of the present invention further includes any of a variety of engineered antigen-binding molecules such as a chimeric antibody (U.S. Pat. Nos. 4,816,567 and 4,816,397; Morrison et al., Proc. Natl. Acad. Sci. USA, 81:6851, 1984; Neuberger et al., Nature 312:604, 1984), a humanized antibody (U.S. Pat. Nos. 5,693,762; 5,585,089; and 5,565,332), a single-chain Fv (U.S. Pat. No. 4,946,778; Ward et al., Nature 334:544, 1989), a bispecific antibody with two binding specificities (Segal et al., J. Immunol. Methods 248:1, 2001; Carter, J. Immunol. Methods 248:7, 2001), a diabody, a triabody, and a tetrabody (Todorovska et al., J. Immunol. Methods, 248:47, 2001), as well as a Fab conjugate (dimer or trimer), and a minibody.

[0353] Many methods are known in the art for generating and/or identifying antibodies to a given target antigen (Harlow, Antibodies, Cold Spring Harbor Press, (1989)). In general, an isolated peptide (e.g., a variant protein of the present invention) is used as an immunogen and is administered to a mammalian organism, such as a rat, rabbit, hamster or mouse. Either a full-length protein, an antigenic peptide fragment (e.g., a peptide fragment containing a region that varies between a variant protein and a corresponding wild-type protein), or a fusion protein can be used. A protein used as an immunogen may be naturally-occurring, synthetic or recombinantly produced, and may be administered in combination with an adjuvant, including but not limited to, Freund's (complete and incomplete), mineral gels such as aluminum hydroxide, surface active substance such as lysolecithin, pluronic polyols, polyanions, peptides, oil emulsions, keyhole limpet hemocyanin, dinitrophenol, and the like.

[0354] Monoclonal antibodies can be produced by hybridoma technology (Kohler and Milstein, Nature, 256:495, 1975), which immortalizes cells secreting a specific monoclonal antibody. The immortalized cell lines can be created in vitro by fusing two different cell types, typically lymphocytes, and tumor cells. The hybridoma cells may be cultivated in vitro or in vivo. Additionally, fully human antibodies can be generated by transgenic animals (He et al., J. Immunol., 169:595, 2002). Fd phage and Fd phagemid technologies may be used to generate and select recombinant antibodies in vitro (Hoogenboom and Chames, Immunol. Today 21:371, 2000; Liu et al., J. Mol. Biol. 315:1063, 2002). The complementarity-determining regions of an antibody can be identified, and synthetic peptides corresponding to such regions may be used to mediate antigen binding (U.S. Pat. No. 5,637,677).

[0355] Antibodies are preferably prepared against regions or discrete fragments of a variant protein containing a variant amino acid sequence as compared to the corresponding wild-type protein (e.g., a region of a variant protein that includes an amino acid encoded by a nonsynonymous cSNP, a region affected by truncation caused by a nonsense SNP that creates a stop codon, or a region resulting from the destruction of a stop codon due to read-through mutation caused by a SNP). Furthermore, preferred regions will include those involved in function/activity and/or protein/binding partner interaction. Such fragments can be selected on a physical property, such as fragments corresponding to regions that are located on the surface of the protein, e.g., hydrophilic regions, or can be selected based on sequence uniqueness, or based on the position of the variant amino acid residue(s) encoded by the SNPs provided by the present invention. An antigenic fragment will typically comprise at least about 8-10 contiguous amino acid residues in which at least one of the amino acid residues is an amino acid affected by a SNP disclosed herein. The antigenic peptide can comprise, however, at least 12, 14, 16, 20, 25, 50, 100 (or any other number in-between) or more amino acid residues, provided that at least one amino acid is affected by a SNP disclosed herein.

[0356] Detection of an antibody of the present invention can be facilitated by coupling (i.e., physically linking) the antibody or an antigen-reactive fragment thereof to a detectable substance. Detectable substances include, but are not limited to, various enzymes, prosthetic groups, fluorescent materials, luminescent materials, bioluminescent materials, and radioactive materials. Examples of suitable enzymes include horseradish peroxidase, alkaline phosphatase, β-galactosidase, or acetylcholinesterase; examples of suitable prosthetic group complexes include streptavidin/biotin and avidin/biotin; examples of suitable fluorescent materials include umbelliferone, fluorescein, fluorescein isothiocyanate, rhodamine, dichlorotriazinylamine fluorescein, dansyl chloride or phycoerythrin; an example of a luminescent material includes luminol; examples of bioluminescent materials include luciferase, luciferin, and aequorin, and examples of suitable radioactive material include ¹²⁵I, ¹³¹I, ³⁵S or ³H.

[0357] Antibodies, particularly the use of antibodies as therapeutic agents, are reviewed in:

[0358] Morgan, “Antibody therapy for Alzheimer's disease”, Expert Rev Vaccines. February 2003; 2(1):53-9; Ross et al., “Anticancer antibodies”, Am J Clin Pathol. April 2003; 119(4):472-85; Goldenberg, “Advancing role of radiolabeled antibodies in the therapy of cancer”, Cancer Immunol Immunother. May 2003;52(5):281-96. Epub Mar. 11, 2003; Ross et al., “Antibody-based therapeutics in oncology”, Expert Rev Anticancer Ther. February 2003; 3(1):107-21; Cao et al., “Bispecific antibody conjugates in therapeutics”, Adv Drug Deliv Rev. Feb. 10, 2003;55(2):171-97; von Mehren et al., “Monoclonal antibody therapy for cancer”, Annu Rev Med. 2003;54:343-69. Epub Dec. 3, 2002; Hudson et al., “Engineered antibodies”, Nat Med. January 2003;9(1):129-34; Brekke et al., “Therapeutic antibodies for human diseases at the dawn of the twenty-first century”, Nat Rev Drug Discov. January 2003; 2(1):52-62 (Erratum in: Nat Rev Drug Discov. March 2003;2(3):240); Houdebine, “Antibody manufacture in transgenic animals and comparisons with other systems”, Curr Opin Biotechnol. December 2002;13(6):625-9; Andreakos et al., “Monoclonal antibodies in immune and inflammatory diseases”, Curr Opin Biotechnol. December 2002;13(6):615-20; Kellermann et al., “Antibody discovery: the use of transgenic mice to generate human monoclonal antibodies for therapeutics”, Curr Opin Biotechnol. December 2002;13(6):593-7; Pini et al., “Phage display and colony filter screening for high-throughput selection of antibody libraries”, Comb Chem High Throughput Screen. November 2002;5(7):503-10; Batra et al., “Pharmacokinetics and biodistribution of genetically engineered antibodies”, Curr Opin Biotechnol. December 2002;13(6):603-8; and Tangri et al., “Rationally engineered proteins or antibodies with absent or reduced immunogenicity”, Curr Med Chem. December 2002; 9(24):2191-9.

[0359] Uses of Antibodies

[0360] Antibodies can be used to isolate the variant proteins of the present invention from a natural cell source or from recombinant host cells by standard techniques, such as affinity chromatography or immunoprecipitation. In addition, antibodies are useful for detecting the presence of a variant protein of the present invention in cells or tissues to determine the pattern of expression of the variant protein among various tissues in an organism and over the course of normal development or disease progression. Further, antibodies can be used to detect variant protein in situ, in vitro, in a bodily fluid, or in a cell lysate or supernatant in order to evaluate the amount and pattern of expression. Also, antibodies can be used to assess abnormal tissue distribution, abnormal expression during development, or expression in an abnormal condition, such as MI. Additionally, antibody detection of circulating fragments of the full-length variant protein can be used to identify turnover.

[0361] Antibodies to the variant proteins of the present invention are also useful in pharmacogenomic analysis. Thus, antibodies against variant proteins encoded by alternative SNP alleles can be used to identify individuals that require modified treatment modalities.

[0362] Further, antibodies can be used to assess expression of the variant protein in disease states such as in active stages of the disease or in an individual with a predisposition to a disease related to the protein's function, particularly MI. Antibodies specific for a variant protein encoded by a SNP-containing nucleic acid molecule of the present invention can be used to assay for the presence of the variant protein, such as to screen for predisposition to MI as indicated by the presence of the variant protein.

[0363] Antibodies are also useful as diagnostic tools for evaluating the variant proteins in conjunction with analysis by electrophoretic mobility, isoelectric point, tryptic peptide digest, and other physical assays well known in the art.

[0364] Antibodies are also useful for tissue typing. Thus, where a specific variant protein has been correlated with expression in a specific tissue, antibodies that are specific for this protein can be used to identify a tissue type.

[0365] Antibodies can also be used to assess aberrant subcellular localization of a variant protein in cells in various tissues. The diagnostic uses can be applied, not only in genetic testing, but also in monitoring a treatment modality. Accordingly, where treatment is ultimately aimed at correcting the expression level or the presence of variant protein or aberrant tissue distribution or developmental expression of a variant protein, antibodies directed against the variant protein or relevant fragments can be used to monitor therapeutic efficacy.

[0366] The antibodies are also useful for inhibiting variant protein function, for example, by blocking the binding of a variant protein to a binding partner. These uses can also be applied in a therapeutic context in which treatment involves inhibiting a variant protein's function. An antibody can be used, for example, to block or competitively inhibit binding, thus modulating (agonizing or antagonizing) the activity of a variant protein. Antibodies can be prepared against specific variant protein fragments containing sites required for function or against an intact variant protein that is associated with a cell or cell membrane. For in vivo administration, an antibody may be linked with an additional therapeutic payload such as a radionucleotide, an enzyme, an immunogenic epitope, or a cytotoxic agent. Suitable cytotoxic agents include, but are not limited to, bacterial toxin such as diphtheria, and plant toxin such as ricin. The in vivo half-life of an antibody or a fragment thereof may be lengthened by pegylation through conjugation to polyethylene glycol (Leong et al., Cytokine 16:106, 2001).

[0367] The invention also encompasses kits for using antibodies, such as kits for detecting the presence of a variant protein in a test sample. An exemplary kit can comprise antibodies such as a labeled or labelable antibody and a compound or agent for detecting variant proteins in a biological sample; means for determining the amount, or presence/absence of variant protein in the sample; means for comparing the amount of variant protein in the sample with a standard; and instructions for use.

[0368] Vectors and Host Cells

[0369] The present invention also provides vectors containing the SNP-containing nucleic acid molecules described herein. The term “vector” refers to a vehicle, preferably a nucleic acid molecule, which can transport a SNP-containing nucleic acid molecule. When the vector is a nucleic acid molecule, the SNP-containing nucleic acid molecule can be covalently linked to the vector nucleic acid. Such vectors include, but are not limited to, a plasmid, single or double stranded phage, a single or double stranded RNA or DNA viral vector, or artificial chromosome, such as a BAC, PAC, YAC, or MAC.

[0370] A vector can be maintained in a host cell as an extrachromosomal element where it replicates and produces additional copies of the SNP-containing nucleic acid molecules. Alternatively, the vector may integrate into the host cell genome and produce additional copies of the SNP-containing nucleic acid molecules when the host cell replicates.

[0371] The invention provides vectors for the maintenance (cloning vectors) or vectors for expression (expression vectors) of the SNP-containing nucleic acid molecules. The vectors can function in prokaryotic or eukaryotic cells or in both (shuttle vectors).

[0372] Expression vectors typically contain cis-acting regulatory regions that are operably linked in the vector to the SNP-containing nucleic acid molecules such that transcription of the SNP-containing nucleic acid molecules is allowed in a host cell. The SNP-containing nucleic acid molecules can also be introduced into the host cell with a separate nucleic acid molecule capable of affecting transcription. Thus, the second nucleic acid molecule may provide a trans-acting factor interacting with the cis-regulatory control region to allow transcription of the SNP-containing nucleic acid molecules from the vector. Alternatively, a trans-acting factor may be supplied by the host cell. Finally, a trans-acting factor can be produced from the vector itself. It is understood, however, that in some embodiments, transcription and/or translation of the nucleic acid molecules can occur in a cell-free system.

[0373] The regulatory sequences to which the SNP-containing nucleic acid molecules described herein can be operably linked include promoters for directing mRNA transcription. These include, but are not limited to, the left promoter from bacteriophage λ, the lac, TRP, and TAC promoters from E. coli, the early and late promoters from SV40, the CMV immediate early promoter, the adenovirus early and late promoters, and retrovirus long-terminal repeats.

[0374] In addition to control regions that promote transcription, expression vectors may also include regions that modulate transcription, such as repressor binding sites and enhancers. Examples include the SV40 enhancer, the cytomegalovirus immediate early enhancer, polyoma enhancer, adenovirus enhancers, and retrovirus LTR enhancers.

[0375] In addition to containing sites for transcription initiation and control, expression vectors can also contain sequences necessary for transcription termination and, in the transcribed region, a ribosome-binding site for translation. Other regulatory control elements for expression include initiation and termination codons as well as polyadenylation signals. A person of ordinary skill in the art would be aware of the numerous regulatory sequences that are useful in expression vectors (see, e.g., Sambrook and Russell, 2000, Molecular Cloning: A Laboratory Manual, Cold Spring Harbor Laboratory Press, Cold Spring Harbor, N.Y.).

[0376] A variety of expression vectors can be used to express a SNP-containing nucleic acid molecule. Such vectors include chromosomal, episomal, and virus-derived vectors, for example, vectors derived from bacterial plasmids, from bacteriophage, from yeast episomes, from yeast chromosomal elements, including yeast artificial chromosomes, from viruses such as baculoviruses, papovaviruses such as SV40, Vaccinia viruses, adenoviruses, poxviruses, pseudorabies viruses, and retroviruses. Vectors can also be derived from combinations of these sources such as those derived from plasmid and bacteriophage genetic elements, e.g., cosmids and phagemids. Appropriate cloning and expression vectors for prokaryotic and eukaryotic hosts are described in Sambrook and Russell, 2000, Molecular Cloning: A Laboratory Manual, Cold Spring Harbor Laboratory Press, Cold Spring Harbor, N.Y.

[0377] The regulatory sequence in a vector may provide constitutive expression in one or more host cells (e.g., tissue specific expression) or may provide for inducible expression in one or more cell types such as by temperature, nutrient additive, or exogenous factor, e.g., a hormone or other ligand. A variety of vectors that provide constitutive or inducible expression of a nucleic acid sequence in prokaryotic and eukaryotic host cells are well known to those of ordinary skill in the art.

[0378] A SNP-containing nucleic acid molecule can be inserted into the vector by methodology well-known in the art. Generally, the SNP-containing nucleic acid molecule that will ultimately be expressed is joined to an expression vector by cleaving the SNP-containing nucleic acid molecule and the expression vector with one or more restriction enzymes and then ligating the fragments together. Procedures for restriction enzyme digestion and ligation are well known to those of ordinary skill in the art.

[0379] The vector containing the appropriate nucleic acid molecule can be introduced into an appropriate host cell for propagation or expression using well-known techniques. Bacterial host cells include, but are not limited to, E. coli, Streptomyces, and Salmonella typhimurium. Eukaryotic host cells include, but are not limited to, yeast, insect cells such as Drosophila, animal cells such as COS and CHO cells, and plant cells.

[0380] As described herein, it may be desirable to express the variant peptide as a fusion protein. Accordingly, the invention provides fusion vectors that allow for the production of the variant peptides. Fusion vectors can, for example, increase the expression of a recombinant protein, increase the solubility of the recombinant protein, and aid in the purification of the protein by acting, for example, as a ligand for affinity purification. A proteolytic cleavage site may be introduced at the junction of the fusion moiety so that the desired variant peptide can ultimately be separated from the fusion moiety. Proteolytic enzymes suitable for such use include, but are not limited to, factor Xa, thrombin, and enterokinase. Typical fusion expression vectors include pGEX (Smith et al., Gene 67:31-40 (1988)), pMAL (New England Biolabs, Beverly, Mass.) and pRIT5 (Pharmacia, Piscataway, N.J.) which fuse glutathione S-transferase (GST), maltose E binding protein, or protein A, respectively, to the target recombinant protein. Examples of suitable inducible non-fusion E. coli expression vectors include pTrc (Amann et al., Gene 69:301-315 (1988)) and pET 11d (Studier et al., Gene Expression Technology: Methods in Enzymology 185:60-89 (1990)).

[0381] Recombinant protein expression can be maximized in a bacterial host by providing a genetic background wherein the host cell has an impaired capacity to proteolytically cleave the recombinant protein (Gottesman, S., Gene Expression Technology: Methods in Enzymology 185, Academic Press, San Diego, Calif. (1990) 119-128). Alternatively, the sequence of the SNP-containing nucleic acid molecule of interest can be altered to provide preferential codon usage for a specific host cell, for example, E. coli (Wada et al., Nucleic Acids Res. 20:2111-2118 (1992)).

[0382] The SNP-containing nucleic acid molecules can also be expressed by expression vectors that are operative in yeast. Examples of vectors for expression in yeast (e.g., S. cerevisiae) include pYepSec1 (Baldari, et al., EMBO J. 6:229-234 (1987)), pMFa (Kwjan et al., Cell 30:933-943(1982)), pJRY88 (Schultz et al., Gene 54:113-123 (1987)), and pYES2 (Invitrogen Corporation, San Diego, Calif.).

[0383] The SNP-containing nucleic acid molecules can also be expressed in insect cells using, for example, baculovirus expression vectors. Baculovirus vectors available for expression of proteins in cultured insect cells (e.g., Sf 9 cells) include the pAc series (Smith et al., Mol. Cell Biol. 3:2156-2165 (1983)) and the pVL series (Lucklow et al., Virology 170:31-39 (1989)).

[0384] In certain embodiments of the invention, the SNP-containing nucleic acid molecules described herein are expressed in mammalian cells using mammalian expression vectors.

[0385] Examples of mammalian expression vectors include pCDM8 (Seed, B. Nature 329:840(1987)) and pMT2PC (Kaufman et al., EMBO J. 6:187-195 (1987)).

[0386] The invention also encompasses vectors in which the SNP-containing nucleic acid molecules described herein are cloned into the vector in reverse orientation, but operably linked to a regulatory sequence that permits transcription of antisense RNA. Thus, an antisense transcript can be produced to the SNP-containing nucleic acid sequences described herein, including both coding and non-coding regions. Expression of this antisense RNA is subject to each of the parameters described above in relation to expression of the sense RNA (regulatory sequences, constitutive or inducible expression, tissue-specific expression).

[0387] The invention also relates to recombinant host cells containing the vectors described herein. Host cells therefore include, for example, prokaryotic cells, lower eukaryotic cells such as yeast, other eukaryotic cells such as insect cells, and higher eukaryotic cells such as mammalian cells.

[0388] The recombinant host cells can be prepared by introducing the vector constructs described herein into the cells by techniques readily available to persons of ordinary skill in the art. These include, but are not limited to, calcium phosphate transfection, DEAE-dextran-mediated transfection, cationic lipid-mediated transfection, electroporation, transduction, infection, lipofection, and other techniques such as those described in Sambrook and Russell, 2000, Molecular Cloning: A Laboratory Manual, Cold Spring Harbor Laboratory, Cold Spring Harbor Laboratory Press, Cold Spring Harbor, N.Y.).

[0389] Host cells can contain more than one vector. Thus, different SNP-containing nucleotide sequences can be introduced in different vectors into the same cell. Similarly, the SNP-containing nucleic acid molecules can be introduced either alone or with other nucleic acid molecules that are not related to the SNP-containing nucleic acid molecules, such as those providing trans-acting factors for expression vectors. When more than one vector is introduced into a cell, the vectors can be introduced independently, co-introduced, or joined to the nucleic acid molecule vector.

[0390] In the case of bacteriophage and viral vectors, these can be introduced into cells as packaged or encapsulated virus by standard procedures for infection and transduction. Viral vectors can be replication-competent or replication-defective. In the case in which viral replication is defective, replication can occur in host cells that provide functions that complement the defects.

[0391] Vectors generally include selectable markers that enable the selection of the subpopulation of cells that contain the recombinant vector constructs. The marker can be inserted in the same vector that contains the SNP-containing nucleic acid molecules described herein or may be in a separate vector. Markers include, for example, tetracycline or ampicillin-resistance genes for prokaryotic host cells, and dihydrofolate reductase or neomycin resistance genes for eukaryotic host cells. However, any marker that provides selection for a phenotypic trait can be effective.

[0392] While the mature variant proteins can be produced in bacteria, yeast, mammalian cells, and other cells under the control of the appropriate regulatory sequences, cell-free transcription and translation systems can also be used to produce these variant proteins using RNA derived from the DNA constructs described herein.

[0393] Where secretion of the variant protein is desired, which is difficult to achieve with multi-transmembrane domain containing proteins such as G-protein-coupled receptors (GPCRs), appropriate secretion signals can be incorporated into the vector. The signal sequence can be endogenous to the peptides or heterologous to these peptides.

[0394] Where the variant protein is not secreted into the medium, the protein can be isolated from the host cell by standard disruption procedures, including freeze/thaw, sonication, mechanical disruption, use of lysing agents, and the like. The variant protein can then be recovered and purified by well-known purification methods including, for example, ammonium sulfate precipitation, acid extraction, anion or cationic exchange chromatography, phosphocellulose chromatography, hydrophobic-interaction chromatography, affinity chromatography, hydroxylapatite chromatography, lectin chromatography, or high performance liquid chromatography.

[0395] It is also understood that, depending upon the host cell in which recombinant production of the variant proteins described herein occurs, they can have various glycosylation patterns, or may be non-glycosylated, as when produced in bacteria. In addition, the variant proteins may include an initial modified methionine in some cases as a result of a host-mediated process.

[0396] For further information regarding vectors and host cells, see Current Protocols in Molecular Biology, John Wiley & Sons, N.Y.

[0397] Uses of Vectors and Host Cells, and Transgenic Animals

[0398] Recombinant host cells that express the variant proteins described herein have a variety of uses. For example, the cells are useful for producing a variant protein that can be further purified into a preparation of desired amounts of the variant protein or fragments thereof. Thus, host cells containing expression vectors are useful for variant protein production.

[0399] Host cells are also useful for conducting cell-based assays involving the variant protein or variant protein fragments, such as those described above as well as other formats known in the art. Thus, a recombinant host cell expressing a variant protein is useful for assaying compounds that stimulate or inhibit variant protein function. Such an ability of a compound to modulate variant protein function may not be apparent from assays of the compound on the native/wild-type protein, or from cell-free assays of the compound. Recombinant host cells are also useful for assaying functional alterations in the variant proteins as compared with a known function.

[0400] Genetically-engineered host cells can be further used to produce non-human transgenic animals. A transgenic animal is preferably a non-human mammal, for example, a rodent, such as a rat or mouse, in which one or more of the cells of the animal include a transgene. A transgene is exogenous DNA containing a SNP of the present invention which is integrated into the genome of a cell from which a transgenic animal develops and which remains in the genome of the mature animal in one or more of its cell types or tissues. Such animals are useful for studying the function of a variant protein in vivo, and identifying and evaluating modulators of variant protein activity. Other examples of transgenic animals include, but are not limited to, non-human primates, sheep, dogs, cows, goats, chickens, and amphibians. Transgenic non-human mammals such as cows and goats can be used to produce variant proteins which can be secreted in the animal's milk and then recovered.

[0401] A transgenic animal can be produced by introducing a SNP-containing nucleic acid molecule into the male pronuclei of a fertilized oocyte, e.g., by microinjection or retroviral infection, and allowing the oocyte to develop in a pseudopregnant female foster animal. Any nucleic acid molecules that contain one or more SNPs of the present invention can potentially be introduced as a transgene into the genome of a non-human animal.

[0402] Any of the regulatory or other sequences useful in expression vectors can form part of the transgenic sequence. This includes intronic sequences and polyadenylation signals, if not already included. A tissue-specific regulatory sequence(s) can be operably linked to the transgene to direct expression of the variant protein in particular cells or tissues.

[0403] Methods for generating transgenic animals via embryo manipulation and microinjection, particularly animals such as mice, have become conventional in the art and are described in, for example, U.S. Pat. Nos. 4,736,866 and 4,870,009, both by Leder et al., U.S. Pat. No. 4,873,191 by Wagner et al., and in Hogan, B., Manipulating the Mouse Embryo, (Cold Spring Harbor Laboratory Press, Cold Spring Harbor, N.Y., 1986). Similar methods are used for production of other transgenic animals. A transgenic founder animal can be identified based upon the presence of the transgene in its genome and/or expression of transgenic mRNA in tissues or cells of the animals. A transgenic founder animal can then be used to breed additional animals carrying the transgene. Moreover, transgenic animals carrying a transgene can further be bred to other transgenic animals carrying other transgenes. A transgenic animal also includes a non-human animal in which the entire animal or tissues in the animal have been produced using the homologously recombinant host cells described herein.

[0404] In another embodiment, transgenic non-human animals can be produced which contain selected systems that allow for regulated expression of the transgene. One example of such a system is the cre/loxP recombinase system of bacteriophage P1 (Lakso et al. PNAS 89:6232-6236 (1992)). Another example of a recombinase system is the FLP recombinase system of S. cerevisiae (O'Gorman et al. Science 251:1351-1355 (1991)). If a cre/loxP recombinase system is used to regulate expression of the transgene, animals containing transgenes encoding both the Cre recombinase and a selected protein are generally needed.

[0405] Such animals can be provided through the construction of “double” transgenic animals, e.g., by mating two transgenic animals, one containing a transgene encoding a selected variant protein and the other containing a transgene encoding a recombinase.

[0406] Clones of the non-human transgenic animals described herein can also be produced according to the methods described in, for example, Wilmut, I. et al. Nature 385:810-813 (1997) and PCT International Publication Nos. WO 97/07668 and WO 97/07669. In brief, a cell (e.g., a somatic cell) from the transgenic animal can be isolated and induced to exit the growth cycle and enter Go phase. The quiescent cell can then be fused, e.g., through the use of electrical pulses, to an enucleated oocyte from an animal of the same species from which the quiescent cell is isolated. The reconstructed oocyte is then cultured such that it develops to morula or blastocyst and then transferred to pseudopregnant female foster animal. The offspring born of this female foster animal will be a clone of the animal from which the cell (e.g., a somatic cell) is isolated.

[0407] Transgenic animals containing recombinant cells that express the variant proteins described herein are useful for conducting the assays described herein in an in vivo context. Accordingly, the various physiological factors that are present in vivo and that could influence ligand or substrate binding, variant protein activation, signal transduction, or other processes or interactions, may not be evident from in vitro cell-free or cell-based assays. Thus, non-human transgenic animals of the present invention may be used to assay in vivo variant protein function as well as the activities of a therapeutic agent or compound that modulates variant protein function/activity or expression. Such animals are also suitable for assessing the effects of null mutations (i.e., mutations that substantially or completely eliminate one or more variant protein functions).

[0408] For further information regarding transgenic animals, see Houdebine, “Antibody manufacture in transgenic animals and comparisons with other systems”, Curr Opin Biotechnol. December 2002;13(6):625-9; Petters et al., “Transgenic animals as models for human disease”, Transgenic Res. 2000;9(4-5):347-51; discussion 345-6; Wolf et al., “Use of transgenic animals in understanding molecular mechanisms of toxicity”, J Pharm Pharmacol. June 1998;50(6):567-74; Echelard, “Recombinant protein production in transgenic animals”, Curr Opin Biotechnol. October 1996;7(5):536-40; Houdebine, “Transgenic animal bioreactors”, Transgenic Res. 2000;9(4-5):305-20; Pirity et al., “Embryonic stem cells, creating transgenic animals”, Methods Cell Biol. 1998;57:279-93; and Robl et al., “Artificial chromosome vectors and expression of complex proteins in transgenic animals”, Theriogenology. Jan. 1, 2003;59(1):107-13.

### Computer-Related Embodiments

[0409] The SNPs provided in the present invention may be “provided” in a variety of mediums to facilitate use thereof. As used in this section, “provided” refers to a manufacture, other than an isolated nucleic acid molecule, that contains SNP information of the present invention. Such a manufacture provides the SNP information in a form that allows a skilled artisan to examine the manufacture using means not directly applicable to examining the SNPs or a subset thereof as they exist in nature or in purified form. The SNP information that may be provided in such a form includes any of the SNP information provided by the present invention such as, for example, polymorphic nucleic acid and/or amino acid sequence information such as SEQ ID NOS:1-126, SEQ ID NOS:127-252, SEQ ID NOS:1585-1662, SEQ ID NOS:253-1584, and SEQ ID NOS:1663-17,275; information about observed SNP alleles, alternative codons, populations, allele frequencies, SNP types, and/or affected proteins; or any other information provided by the present invention in Tables 1-2 and/or the Sequence Listing.

[0410] In one application of this embodiment, the SNPs of the present invention can be recorded on a computer readable medium. As used herein, “computer readable medium“refers to any medium that can be read and accessed directly by a computer. Such media include, but are not limited to: magnetic storage media, such as floppy discs, hard disc storage medium, and magnetic tape; optical storage media such as CD-ROM; electrical storage media such as RAM and ROM; and hybrids of these categories such as magnetic/optical storage media. A skilled artisan can readily appreciate how any of the presently known computer readable media can be used to create a manufacture comprising computer readable medium having recorded thereon a nucleotide sequence of the present invention. One such medium is provided with the present application, namely, the present application contains computer readable medium (CD-R) that has nucleic acid sequences (and encoded protein sequences) containing SNPs provided/recorded thereon in ASCII text format in a Sequence Listing along with accompanying Tables that contain detailed SNP and sequence information (transcript sequences are provided as SEQ ID NOS:1-126, protein sequences are provided as SEQ ID NOS:127-252, genomic sequences are provided as SEQ ID NOS:1585-1662, transcript-based context sequences are provided as SEQ ID NOS:253-1584, and genomic-based context sequences are provided as SEQ ID NOS:1663-17,275).

[0411] As used herein, “recorded” refers to a process for storing information on computer readable medium. A skilled artisan can readily adopt any of the presently known methods for recording information on computer readable medium to generate manufactures comprising the SNP information of the present invention.

[0412] A variety of data storage structures are available to a skilled artisan for creating a computer readable medium having recorded thereon a nucleotide or amino acid sequence of the present invention. The choice of the data storage structure will generally be based on the means chosen to access the stored information. In addition, a variety of data processor programs and formats can be used to store the nucleotide/amino acid sequence information of the present invention on computer readable medium. For example, the sequence information can be represented in a word processing text file, formatted in commercially-available software such as WordPerfect and Microsoft Word, represented in the form of an ASCII file, or stored in a database application, such as OB2, Sybase, Oracle, or the like. A skilled artisan can readily adapt any number of data processor structuring formats (e.g., text file or database) in order to obtain computer readable medium having recorded thereon the SNP information of the present invention.

[0413] By providing the SNPs of the present invention in computer readable form, a skilled artisan can routinely access the SNP information for a variety of purposes. Computer software is publicly available which allows a skilled artisan to access sequence information provided in a computer readable medium. Examples of publicly available computer software include BLAST (Altschul et al., J. Mol. Biol. 215:403-410 (1990)) and BLAZE (Brutlag et al., Comp. Chem. 17:203-207 (1993)) search algorithms.

[0414] The present invention further provides systems, particularly computer-based systems, which contain the SNP information described herein. Such systems may be designed to store and/or analyze information on, for example, a large number of SNP positions, or information on SNP genotypes from a large number of individuals. The SNP information of the present invention represents a valuable information source. The SNP information of the present invention stored/analyzed in a computer-based system may be used for such computer-intensive applications as determining or analyzing SNP allele frequencies in a population, mapping disease genes, genotype-phenotype association studies, grouping SNPs into haplotypes, correlating SNP haplotypes with response to particular drugs, or for various other bioinformatic, pharmacogenomic, drug development, or human identification/forensic applications.

[0415] As used herein, “a computer-based system” refers to the hardware means, software means, and data storage means used to analyze the SNP information of the present invention. The minimum hardware means of the computer-based systems of the present invention typically comprises a central processing unit (CPU), input means, output means, and data storage means. A skilled artisan can readily appreciate that any one of the currently available computer-based systems are suitable for use in the present invention. Such a system can be changed into a system of the present invention by utilizing the SNP information provided on the CD-R, or a subset thereof, without any experimentation.

[0416] As stated above, the computer-based systems of the present invention comprise a data storage means having stored therein SNPs of the present invention and the necessary hardware means and software means for supporting and implementing a search means. As used herein, “data storage means” refers to memory which can store SNP information of the present invention, or a memory access means which can access manufactures having recorded thereon the SNP information of the present invention.

[0417] As used herein, “search means” refers to one or more programs or algorithms that are implemented on the computer-based system to identify or analyze SNPs in a target sequence based on the SNP information stored within the data storage means. Search means can be used to determine which nucleotide is present at a particular SNP position in the target sequence. As used herein; a “target sequence” can be any DNA sequence containing the SNP position(s) to be searched or queried.

[0418] As used herein, “a target structural motif,” or “target motif,” refers to any rationally selected sequence or combination of sequences containing a SNP position in which the sequence(s) is chosen based on a three-dimensional configuration that is formed upon the folding of the target motif. There are a variety of target motifs known in the art. Protein target motifs include, but are not limited to, enzymatic active sites and signal sequences. Nucleic acid target motifs include, but are not limited to, promoter sequences, hairpin structures, and inducible expression elements (protein binding sequences).

[0419] A variety of structural formats for the input and output means can be used to input and output the information in the computer-based systems of the present invention. An exemplary format for an output means is a display that depicts the presence or absence of specified nucleotides (alleles) at particular SNP positions of interest. Such presentation can provide a rapid, binary scoring system for many SNPs simultaneously.

[0420] One exemplary embodiment of a computer-based system comprising SNP information of the present invention is provided in FIG. 1. FIG. 1 provides a block diagram of a computer system 102 that can be used to implement the present invention. The computer system 102 includes a processor 106 connected to a bus 104. Also connected to the bus 104 are a main memory 108 (preferably implemented as random access memory, RAM) and a variety of secondary storage devices 110, such as a hard drive 112 and a removable medium storage device 114. The removable medium storage device 114 may represent, for example, a floppy disk drive, a CD-ROM drive, a magnetic tape drive, etc. A removable storage medium 116 (such as a floppy disk, a compact disk, a magnetic tape, etc.) containing control logic and/or data recorded therein may be inserted into the removable medium storage device 114. The computer system 102 includes appropriate software for reading the control logic and/or the data from the removable storage medium 116 once inserted in the removable medium storage device 114.

[0421] The SNP information of the present invention may be stored in a well-known manner in the main memory 108, any of the secondary storage devices 110, and/or a removable storage medium 116. Software for accessing and processing the SNP information (such as SNP scoring tools, search tools, comparing tools, etc.) preferably resides in main memory 108 during execution.

### EXAMPLES

[0422] The following examples are offered to illustrate, but not to limit, the claimed invention.

[0423] Statistical Analysis of SNP Allele Association with MI

[0424] A case-control genetic study to determine the association of SNPs in the human genome with CHD, particularly MI, was carried out using genomic DNA extracted from 2 independently collected sample sets. One sample set obtained from the University of California, San Francisco (UCSF), consisted of DNA from 1,654 Caucasian patients. A subset of these patients were diagnosed with MI but might have had other vascular diseases. The patients were divided into cases and controls depending on the study design (see Table 6). A second sample set obtained from the Cleveland Clinic (CCF) consisted of DNA from 1,501 Caucasian patients. A subset of these patients had a history of MI but might have had other vascular diseases. All patients had either very little or severe coronary artery stenosis, evidenced by coronary angiography. These samples were divided into cases and controls depending on the study design (see Table 6). All samples in both studies were obtained from people between the ages of 18-89. All individuals included in each study had signed a written informed consent form. The study protocols were IRB approved.

[0425] DNA was extracted from blood samples at CCF or UCSF using conventional DNA extraction methods or commercially available kits according to the manufacturer's suggested conditions, such as the QIA-amp kit from Qiagen (Valencia, Calif.). SNP markers in the extracted DNA samples were analyzed by genotyping. While some samples were individually genotyped, the same samples were also used for pooling studies, in which DNA samples from about 50 individuals were pooled and allele frequencies were obtained using a PRISM® 7900HT Sequence Detection System (Applied Biosystems, Foster City, Calif.) by allele-specific PCR, similar to the method described by Germer et al., Genome Research 10:258-266 (2000). Alternatively, the sample genotypes were obtained by performing an oligonucleotide ligation assay (OLA). Briefly, the genomic regions containing the SNPs of interest were amplified from DNA obtained from patient samples using PCR primers. Then the individual samples were genotyped by ligating the allele specific probes and a ligation specific probe. Each allele specific probe was attached to a Luminexg bead that had a specific fluorescence. The ligated products were then detected in a Luminex(® 100™ fluorimeter (Luminex Corporation, Austin, Tex.).

[0426] Genotype or allele frequency results of 34 SNPs in the UCSF and CCF samples were analyzed for association with MI based on different study designs (see Table 6). The case and control groups were further stratified by sex (F,M), age and smoking status. The allele or genotype frequencies for the tested SNPs were obtained and compared between cases and controls. No multiple testing corrections were made.

[0427] Several tests of association were calculated for both unstratified and stratified settings: 1) Fisher's exact test for allelic association, and 2) asymptotic chi-square test of genotype association of two different modes of inheritance: dominant and recessive.

[0428] Effect sizes were estimated through genotype or allelic odds ratios. The reported allele or genotype may be under-represented in cases (with a lower frequency in cases than in controls, indicating that the reported allele or genotype is associated with a decreased risk and the other allele or genotype is a risk factor for disease) or over represented in cases (indicating that the reported allele or genotype is a risk factor for disease).

[0429] The replicated MI markers are reported in Table 6. A SNP is considered a replicated marker if the association analyses in the two studies showed that the risk allele was the same, the p-values were each less than or equal to 0.1, and the significant association was seen in either the same stratum or in a stratum and its substratum.

[0430] An example of a replicated marker, where the risk allele presented provides a reduced risk of developing MI is hCV 11315168 (ROS1 gene). The risk allele “G” is associated with a reduced risk of having an MI in both the CCF and UCSF samples (P-values of 0.016 and 0.007, and Odds Ratios (OR) of 0.78 and 0.8, respectively for the sample sets).

[0431] An example of a replicated marker, where the risk allele presented provides an increased risk of developing MI is hCV2604332 (GRM8 gene). The risk allele “T” is associated with an increased risk of having an MI in both the CCF and UCSF samples (P-values of 0.00003 and 0.006, and ORs of 1.8 and 1.27, respectively for the sample sets).

[0432] A second example of a replicated marker, where the risk allele presented provides an increased risk of developing MI is hCV323070 (KIAA0992 gene). The risk allele “G” is associated with an increased risk of having an MI in both the CCF and UCSF samples (P-values of 0.021 and 0.007, and ORs of 1.24 and 1.22, respectively for the sample sets).

[0433] An example of a replicated marker, where the homozygous reported allele is associated with an increased risk for MI is hCV16179599 (HARS gene). Females with 2 copies of the reported allele “T” of hCV16179599 (Inheritance mode recessive) showed significant association with MI (p-values 0.024 and 0.046) with increased risk (ORs of 1.35 and 1.30 times of the reference) when compared to those individuals carrying 1 or 0 of the reported allele (heterozygotes and homozygotes of the non-risk allele) in both the CCF and UCSF sample sets.

[0434] An example of a replicated marker where the homozygous reported allele is associated with a decreased risk of MI is hCV22271906 (BRD2 gene). Among the study population, all carriers of one or two copies of the reported allele “T” (Inheritance model Dom) of hCV22271906 showed significant association (p-values of 0.035 and 0.068) with a decreased risk of developing MI (ORs of 0.38 and 0.68) compared with those carrying 0 of the reported allele (homozygotes of the non-risk allele) in both the CCF and UCSF samples.

[0435] SNPs have been identified in genes presented in Table 6 and have been shown to be associated with MI. Other SNPs in these same genes listed in Table 6 may also exist and would also be associated with MI. All such SNPs may be associated with CHD and predicting a patients response to therapeutic agents such as statins.

[0436] All publications and patents cited in this specification are herein incorporated by reference in their entirety. Various modifications and variations of the described compositions, methods and systems of the invention will be apparent to those skilled in the art without departing from the scope and spirit of the invention. Although the invention has been described in connection with specific preferred embodiments and certain working examples, it should be understood that the invention as claimed should not be unduly limited to such specific embodiments. Indeed, various modifications of the above-described modes for carrying out the invention that are obvious to those skilled in the field of molecular biology, genetics and related fields are intended to be within the scope of the following claims.

TABLE 5

| | | Sequence A | Sequence B | Sequence C |
|---|---|---|---|---|
| Marker | Alleles | (allele-specific primer) | (allele-specific primer) | (common primer) |
| hCV11315168 | G/C | GTTGTTTGCTTCATCTCTGG | GTTGTTTGCTTCATCTCTGC | AGTGCTGGGCTCAAGAAC |
| | | (SEQ ID NO: 17276) | (SEQ ID NO: 17277) | (SEQ ID NO: 17278) |
| hCV12107274 | C/T | TGATGCTAATCTGTTCTCTGTG | TCTGATGCTAATCTGTTCTCTGTA | ATAACAAGAGGAAGGAGATCAGA |
| | | (SEQ ID NO: 17279) | (SEQ ID NO: 17280) | (SEQ ID NO: 17281) |
| hCV15974589 | C/T | ATTATTTTTCTGTTTGACATAGGC | CATTATTTTTCTGTTGACATAGGT | GGCCAACACTTCTCATTCTAGT |
| | | (SEQ ID NO: 17282) | (SEQ ID NO: 17283) | (SEQ ID NO: 17284) |
| hCV1643239 | C/T | CCAGAGTCCACAGAAAGTTTC | CCAGAGTCCACAGAAAGTTTT | GAAAATAACGCAAGCAGTTTC |
| | | (SEQ ID NO: 17285) | (SEQ ID NO: 17286) | (SEQ ID NO: 17287) |
| hCV25753038 | C/T | GAGCCACCTATGTTCTCTACC | GGAGCCACCTATGTTCTCTACT | TCCCTCTTTGCTCATTCATC |
| | | (SEQ ID NO: 17288) | (SEQ ID NO: 17289) | (SEQ ID NO: 17290) |
| hCV25930271 | T/C | CGAATCTCATGTTCAGGAAATA | GAATCTCATGTTCAGGAAATG | GCCATGGCCCATAAAAC |
| | | (SEQ ID NO: 17291) | (SEQ ID NO: 17292) | (SEQ ID NO: 17293) |
| hCV2002654 | G/C | GGAGCCCCAGGAAAC | GGAGCCCCAGGAAAG | AGAGCCCTCGGTTCTTG |
| | | (SEQ ID NO: 17294) | (SEQ ID NO: 17295) | (SEQ ID NO: 17296) |
| hCV2604332 | G/T | GCAAATCAAGTAAAAGATCTGTTTC | GCAAATCAAGTAAAAGATCTGTTTA | CTGCAGCAGCTAAATGTCA |
| | | (SEQ ID NO: 17297) | (SEQ ID NO: 17298) | (SEQ ID NO: 17299) |
| hCV323070 | A/G | GCCCAGAAAGATGAGTTCA | GCCCAGAAAGATGAGTTCG | TGTCCCTTTTTCAGAGACATAGAT |
| | | (SEQ ID NO: 17300) | (SEQ ID NO: 17301) | (SEQ ID NO: 17302) |
| hCV761961 | C/T | CACAGTCAAAGAATCAAGCG | TCACAGTCAAAGAATCAAGCA | AAATTCTTACCCTGAGTTCAGTTC |
| | | (SEQ ID NO: 17303) | (SEQ ID NO: 17304) | (SEQ ID NO: 17305) |
| hCV11955606 | C/T | CCGGCCTCCGCAG | CCGGCCTCCGCAA | GAGCCAGCAACGAGATCT |
| | | (SEQ ID NO: 17306) | (SEQ ID NO: 17307) | (SEQ ID NO: 17308) |
| hCV16093418 | G/A | AAGAAGTTCACAGCTGAAGG | CAAGAAGTTCACAGCTGAAGA | CCTGCTGGAGAGACAGAGTG |
| | | (SEQ ID NO: 17309) | (SEQ ID NO: 17310) | (SEQ ID NO: 17311) |
| hCV16179599 | C/T | CTGCTCTCAGAACCTCAGTC | CTGCTCTCAGAACCTCAGTT | CACTGCAGGGAAATAGAGAAA |
| | | (SEQ ID NO: 17312) | (SEQ ID NO: 17313) | (SEQ ID NO: 17314) |
| hCV2199708 | G/T | AAAACTGATATACGTGTTTTGTCC | AAAAACTGTATACGTGTTTTGTCA | ACAAGCATTCAAGATACTGTTTAC |
| | | (SEQ ID NO: 17315) | (SEQ ID NO: 17316) | (SEQ ID NO: 17317) |
| hCV22271906 | C/T | GCGGTGAGGGGAACC | GCGGTGAGGGGAACT | GCTCGCGGAAACGTACTT |
| | | (SEQ ID NO: 17318) | (SEQ ID NO: 17319) | (SEQ ID NO: 17320) |
| hCV8804684 | A/T | TGTGTATATCCACGGCATTAT | TGTGTATATCCACGGCATTAA | TGCCCTCACCCAATATTC |
| | | (SEQ ID NO: 17321) | (SEQ ID NO: 17322) | (SEQ ID NO: 17323) |
| hCV1449414 | C/T | CACACATATGGTGGTTCATAAC | ACACACATATGGTGGTTCATAAT | CATGTCCCAGCTCTTCTTG |
| | | (SEQ ID NO: 17324) | (SEQ ID NO: 17325) | (SEQ ID NO: 17326) |
| hCV15963962 | G/A | CTGTCCCGTGTTCCG | TACTGTCCCGTGTTCCA | CTCTCCCAGAGCCCTCTAG |
| | | (SEQ ID NO: 17327) | (SEQ ID NO: 17328) | (SEQ ID NO: 17329) |
| hCV15883111 | A/G | TTCCTCTCATTTCCATCA | TCCTCTCATTTCCATCG | GGCCATGCATGTCTCTG |
| | | (SEQ ID NO: 17330) | (SEQ ID NO: 17331) | (SEQ ID NO: 17332) |
| hCV2659022 | G/C | TGCTGGGTGTCCACG | CTGCTGGGTGTCCACC | AGGAGCTGAGGAAGATCTCA |
| | | (SEQ ID NO: 17333) | (SEQ ID NO: 17334) | (SEQ ID NO: 17335) |
| hCV25924894 | G/A | GGGAAGTTCTTTCTTGTATATTCAG | GGGAAGTTCTTTCTTGTATATTCAA | TGCTGTCTTTGCCTCACTAAT |
| | | (SEQ ID NO: 17336) | (SEQ ID NO: 17337) | (SEQ ID NO: 17338) |
| hCV3197290 | A/G | CACAACATGAAAGAGATGGAA | CACAACATGAAAGAGATGGAG | AGAAATAAGACTTGAAGGAAATC |
| | | (SEQ ID NO: 17339) | (SEQ ID NO: 17340) | (SEQ ID NO: 17341) |
| hCV1247654 | G/C | GTATCCAAGAAAGTTCTTCCG | GTATCCAAGAAAGTTCTTCCC | GAGTTATCAAAATGAACCTGTCTC |
| | | (SEQ ID NO: 17342) | (SEQ ID NO: 17343) | (SEQ ID NO: 17344) |
| hCV15853281 | C/T | TGGTGGTGCTGTCAAC | TGGTGGTGCTGTCAAT | CCCGTGGAGGGTCTGA |
| | | (SEQ ID NO: 17345) | (SEQ ID NO: 17346) | (SEQ ID NO: 17347) |
| hCV2524821 | G/A | TGTGACTGGTCCCTCTCAC | TGTGACTGGTCCCTCTCAT | CAGGCCTGCTTGGTACAA |
| | | (SEQ ID NO: 17348) | (SEQ ID NO: 17349) | (SEQ ID NO: 17350) |
| hCV3199237 | A/G | GTACTCCTCTTCATCCATTGA | TACTCCTCTTCATCCATTGG | TCCCCCTCCCACACTTAC |
| | | (SEQ ID NO: 17351) | (SEQ ID NO: 17352) | (SEQ ID NO: 17353) |
| hCV1327832 | C/T | GCCCCTGATTTTACTCATTG | GGCCCCTGATTTTACTCATTA | GGGCAGATCACATCAACATC |
| | | (SEQ ID NO: 17354) | (SEQ ID NO: 17355) | (SEQ ID NO: 17356) |
| hCV25623506 | C/T | TGCAGGGGACTGGAGTC | TGCAGGGGACTGGAGTT | CCCTTGCAGGGCTTCTAC |
| | | (SEQ ID NO: 17357) | (SEQ ID NO: 17358) | (SEQ ID NO: 17359) |
| hCV2269946 | G/A | GCACGTGCATGTCCTTAC | GCACGTGCATGTCCTTAT | CCGGAAGTTGTGAAAACTAAC |
| | | (SEQ ID NO: 17360) | (SEQ ID NO: 17361) | (SEQ ID NO: 17362) |
| hCV25595897 | A/G | TACTATGCAATCGTTCATCAGT | TATGCAATCGTTCATCAGC | TGCAATCTGGACACTTTATTATAA |
| | | (SEQ ID NO: 17363) | (SEQ ID NO: 17364) | (SEQ ID NO: 17365) |
| hCV11801078 | T/C | TTAAATGTGGCCACTAGAAAAT | TAAATGTGGCCACTAGAAAAC | CCCAATTCAGCTGTTTATTTC |
| | | (SEQ ID NO: 17366) | (SEQ ID NO: 17367) | (SEQ ID NO: 17368) |
| hCV29592089 | C/A | CCCTGCCTCTGTCTGACTC | CCCTGCCTCTGTCTGACTA | AAGACAAGCCCAGGTTCA |
| | | (SEQ ID NO: 17369) | (SEQ ID NO: 17370) | (SEQ ID NO: 17371) |
| hCV7494113 | T/A | CAAGGCATCTCTGTTAACCAA | CAAGGCATCTCTGTTAACCAT | GGCTCCAGCCTCTGTAGAA |
| | | (SEQ ID NO: 17372) | (SEQ ID NO: 17373) | (SEQ ID NO: 17374) |
| hCV8829851 | C/T | AACCAATGCCATCTGTCC | AAACCAATGCCATCTGTCT | GGACCAGAAATGGATCTCTTT |
| | | (SEQ ID NO: 17375) | (SEQ ID NO: 17376) | (SEQ ID NO: 17377) |

[0437] TABLE 6

| | | | | CCF Samples | | | | UCSF Samples | | | |
|---|---|---|---|---|---|---|---|---|---|---|---|
| SNP Marker | Gene Name | Allele | Mode | Design | Strata | P-value | OR | Design | Strata | P-value | OR |
| hCV11315168 | ROS1 | G | allelic | A | ALL | 0.016 | 0.78 | A | ALL | 0.007 | 0.80 |
| hCV12107274 | TAS2R50 | T | allelic | B | ALL | 0.086 | 0.80 | A | ALL | 0.004 | 0.80 |
| hCV15974589 | MLF1 | T | allelic | B | ALL | 0.056 | 0.79 | B | M | 0.051 | 0.79 |
| hCV1643239 | PPARGC1A | T | allelic | B | ALL | 0.084 | 0.81 | B | SMOKE | 0.070 | 0.81 |
| hCV25753038 | AQP10 | C | dominant | B | ALL | 0.018 | 0.51 | A | ALL | 0.082 | 0.69 |
| hCV25930271 | none | T | allelic | B | ALL | 1.0E−04 | 0.18 | A | ALL | 0.018 | 0.56 |
| hCV2002654 | none | G | allelic | B | ALL | 0.074 | 1.24 | A | ALL | 0.00012 | 1.32 |
| hCV2604332 | GRM8 | T | allelic | B | ALL | 0.00003 | 1.80 | A | ALL | 0.006 | 1.27 |
| hCV323070 | KIAA0992 | G | allelic | A | ALL | 0.021 | 1.24 | A | ALL | 0.007 | 1.22 |
| hCV761961 | FABP2 | T | allelic | A | ALL | 0.025 | 1.25 | A | SMOKE | 0.059 | 1.23 |
| hCV11955606 | RANGNRF | T | allelic | A | ALL | 0.061 | 1.26 | B | ALL | 0.002 | 1.31 |
| hCV16093418 | none | G | allelic | A | ALL | 0.065 | 1.34 | A | F | 0.024 | 1.41 |
| hCV16179599 | HARS | T | recessive | C | F | 0.024 | 1.35 | A | F | 0.046 | 1.30 |
| hCV2199708 | CHCHD3 | T | recessive | B | F | 0.021 | 0.73 | B | F | 0.016 | 0.83 |
| hCV22271906 | BRD2 | T | dominant | B | F | 0.035 | 0.38 | A | ALL | 0.068 | 0.68 |
| hCV8804684 | none | T | dominant | A | M | 0.027 | 0.60 | A | M | 0.020 | 0.63 |
| hCV1449414 | OR13G1 | C | allelic | A | ALL | 0.002 | 1.32 | A | ALL | 0.051 | 1.148406 |
| hCV15963962 | P2RXL1 | G | allelic | A | ALL | 0.026 | 0.78 | A | ALL | 0.034 | 0.83 |
| hCV15883111 | BTNL8 | G | dominant | B | ALL | 0.027 | 1.33 | A | ALL | 0.038 | 1.12 |
| hCV2659022 | GIPR | G | recessive | A | M | 0.048 | 1.32 | A | M | 0.007 | 1.42 |
| hCV25924894 | SERPINA9 | G | allelic | B | ALL | 0.033 | 0.76 | A | ALL | 0.058 | 0.86 |
| hCV3197290 | ACCN1 | G | allelic | C | ALL | 9.7E−05 | 1.637 | A | ALL | 0.022 | 1.310294 |
| hCV1247654 | NDP52 | G | allelic | C | M | 0.033 | 0.793 | A | ALL | 0.038 | 0.821347 |
| hCV15853281 | ALDH4A1 | T | allelic | C | M | 0.034 | 1.362 | A | M | 0.014 | 1.455775 |
| hCV2524821 | FLJ10547 | G | allelic | C | M | 0.047 | 0.692 | A | ALL | 0.027 | 0.693215 |
| hCV3199237 | LRRC25 | G | allelic | C | ALL | 0.003 | 1.326 | A | ALL | 0.032 | 1.1966 |
| hCV1327832 | none | T | allelic | C | ALL | 0.010 | 1.263 | A | ALL | 0.047 | 1.170867 |
| hCV25623506 | LTK | T | allelic | C | ALL | 0.039 | 1.479 | A | ALL | 0.007 | 1.488856 |
| hCV2269946 | none | G | allelic | C | ALL | 0.018 | 0.804 | A | ALL | 0.031 | 0.838663 |
| hCV25595897 | C10orf68 | G | allelic | C | ALL | 0.002 | 0.156 | A | ALL | 0.046 | 0.535958 |
| hCV11801078 | BACH1 | C | allelic | C | ALL | 0.099 | 1.22 | A | ALL | 0.085 | 1.13 |
| hCV25952089 | LY6G5B | C | allelic | B | ALL | 0.003 | 2.66 | A | ALL | 0.040 | 1.50 |
| hCV7494113 | PGLYRP2 | T | dominant | B | ALL | 0.040 | 1.27 | A | ALL | 0.003 | 1.31 |
| hCV8829851 | none | T | recessive | A | F | 0.016 | 1.52 | A | F | 0.079 | 1.16 |

CCF Design
A MI cases vs. No MI and less than 50% stenosis controls
B MI cases vs. No MI and no detectable stenosis control
C MI cases vs. No MI controls
UCSF Design
A MI cases vs. no MI controls, stenosis possible
B premature MI cases vs. older no MI controls
Strata
ALL unstratified analysis
M Males
F Females
SMOKE past or present tobacco users

What is claimed is:

1. A method for identifying an individual who has an altered risk for developing myocardial infarction (MI), comprising detecting a single nucleotide polymorphism (SNP) in any one of the nucleotide sequences of SEQ ID NOS:1-126 and 253-17,275 in said individual's nucleic acids, wherein the presence of the SNP is correlated with an altered risk for MI in said individual.

2. The method of claim 1 in which the altered risk is an increased risk.

3. The method of claim 2 in which said individual has previously had an MI.

4. The method of claim 1 in which the altered risk is a decreased risk.

5. The method of claim 1, wherein the SNP is selected from the group consisting of the SNPs set forth in Table 6.

6. The method of claim 1 in which detection is carried out by a process selected from the group consisting of: allele-specific probe hybridization, allele-specific primer extension, allele-specific amplification, sequencing, 5′ nuclease digestion, molecular beacon assay, oligonucleotide ligation assay, size analysis, and single-stranded conformation polymorphism.

7. An isolated nucleic acid molecule comprising at least 8 contiguous nucleotides wherein one of the nucleotides is a single nucleotide polymorphism (SNP) selected from any one of the nucleotide sequences in SEQ ID NOS: 1-126 and 253-17,275, or a complement thereof.

8. The isolated nucleic acid molecule of claim 7, wherein the SNP is selected from the group consisting of the SNPs set forth in Tables 3 and 4.

9. An isolated nucleic acid molecule that encodes any one of the amino acid sequences in SEQ ID NOS:127-252.

10. An isolated polypeptide comprising an amino acid sequence selected from the group consisting of SEQ ID NOS:127-252.

11. An antibody that specifically binds to a polypeptide of claim 10, or an antigen-binding fragment thereof.

12. The antibody of claim 11 in which the antibody is a monoclonal antibody.

13. An amplified polynucleotide containing a single nucleotide polymorphism (SNP) selected from any one of the nucleotide sequences of SEQ ID NOS:1-126 and 253-17,275, or a complement thereof, wherein the amplified polynucleotide is between about 16 and about 1,000 nucleotides in length.

14. The amplified polynucleotide of claim 13 in which the nucleotide sequence comprises any one of the nucleotide sequences of SEQ ID NOS: 1-1 26 and 253-=b 17,275.

15. An isolated polynucleotide which specifically hybridizes to a nucleic acid molecule containing a single nucleotide polymorphism (SNP) in any one of the nucleotide sequences in SEQ ID NOS:1-126 and 253-17,275.

16. The polynucleotide of claim 15 that is 8-70 nucleotides in length.

17. The polynucleotide of claim 15 that is an allele-specific probe.

18. The polynucleotide of claim 15 that is an allele-specific primer.

19. The polynucleotide of claim 15, wherein the polynucleotide comprises a nucleotide sequence selected from the group consisting of the primer sequences set forth in Table 5 (SEQ ID NOS:17,276-17,377).

20. A kit for detecting a single nucleotide polymorphism (SNP) in a nucleic acid, comprising the polynucleotide of claim 15, a buffer, and an enzyme.

21. A method of detecting a single nucleotide polymorphism (SNP) in a nucleic acid molecule, comprising contacting a test sample with a reagent which specifically hybridizes to a SNP in any one of the nucleotide sequences of SEQ ID NOS:1-126 and 253-17,275 under stringent hybridization conditions, and detecting the formation of a hybridized duplex.

22. The method of claim 21 in which detection is carried out by a process selected from the group consisting of: allele-specific probe hybridization, allele-specific primer extension, allele-specific amplification, sequencing, 5′ nuclease digestion, molecular beacon assay, oligonucleotide ligation assay, size analysis, and single-stranded conformation polymorphism.

23. A method of detecting a variant polypeptide, comprising contacting a reagent with a variant polypeptide encoded by a single nucleotide polymorphism (SNP) in any one of the nucleotide sequences of SEQ ID NOS:1-126 and 253-17,275 in a test sample, and detecting the binding of the reagent to the polypeptide.

24. A method for identifying an agent useful in therapeutically or prophylactically treating MI, comprising contacting the polypeptide of claim 10 with a candidate agent under conditions suitable to allow formation of a binding complex between the polypeptide and the candidate agent, and detecting the formation of the binding complex, wherein the presence of the complex identifies said agent.

25. A method for identifying an individual who is in need of receiving treatment for MI, comprising detecting a single nucleotide polymorphism (SNP) in a sample from that individual in any one of the genes listed in Table 6 and treating that individual with a therapeutic agent.

26. The method of claim 25, wherein the therapeutic agent is a statin.

The application's sequence listing, which the Patent Office published only in electronic form, follows.

SEQUENCE LISTING (17377 sequences)

SEQ ID NO: 1 - DNA, 788 bp, Homo sapiens
ggcccccgccgccaccgcgccccccgcgggagatggaacagcggaaccggctcggtgccctcggatacctgccgcctctgctgctgcatgccctgctgctcttcgtggccgacgctgcattcacagaagtccccaaagatgtgacagtacgggagggagacgacatcgaaatgccctgcgcgttccgggccagcggagccacctcgtattcgctggagattcagtggtggtacctcaaggagccaccccgggagctgctgcacgagctggcgctcagcgtgccgggcgcccggagcaaggtaacaaataaggatgcaactaaaatcagcaccgtacgcgtccagggcaatgacatytcacaccggcttcggctgtctgccgtgcggctgcaggacgagggcgtgtacgagtgccgcgtgtcggactacagcgacgacgacacgcaggagcacaaggcccaggcgatgctgcgcgtgctctcgcgcttcgcgccgcccaacatgcaggccgccgaggccgtgtcccacatccagagcagcggcccgcgtcgccacggcccagccagcgccgccaacgccaacaacgcgggcgccgcgagccgctattggcttgatccgaaggcctcatccgtcttggatgccacacaggagcccacaagactgtccctcaggctactggggaagggctgcatcaccagccagtgccccgagctcagctgctggcaccaggtmctgctgagcgccctgagaggcagcaagccagctgctttgctcrgaaccacagcagcc

SEQ ID NO: 2 - DNA, 1474 bp, Homo sapiens
ggcccccgccgccaccgcgccccccgcgggagatggaacagcggaaccggctcggtgccctcggatacctgccgcctctgctgctgcatgccctgctgctcttcgtggccgacgctgcattcacagaagtccccaaagatgtgacagtacgggagggagacgacatcgaaatgccctgcgcgttccgggccagcggagccacctcgtattcgctggagattcagtggtggtacctcaaggagccaccccgggagctgctgcacgagctggcgctcagcgtgccgggcgcccggagcaaggtaacaaataaggatgcaactaaaatcagcaccgtacgcgtccagggcaatgacatytcacaccggcttcggctgtctgccgtgcggctgcaggacgagggcgtgtacgagtgccgcgtgtcggactacagcgacgacgacacgcaggagcacaaggcccaggcgatgctgcgcgtgctctcgcgcttcgcgccgcccaacatgcaggccgccgaggccgtgtcccacatccagagcagcggcccgcgtcgccacggcccagccagcgccgccaacgccaacaacgcgggcgccgcgagccgtaccacctccgagcccggccgcggcgacaagagcccgccgcccgggagccctcccgccgccatcgatcccgcagtccccgaggccgcggcagcctcggcggcccacacgcccaccaccacagtcgcggcagctgctgctgcctcgtcagcgtcgccgccatcgggacaggcggtcctgctgcgccagaggcacggctcgggcaccggccgtagctacaccacagacccactcttgtccctgctcctgttagctctgcataagttcctgcgcctgctcttgggacattgacagacaagaccaacccgagcatctcagaggcygcacatgacctgcccggggccctcggtgaggaccatgtcgctggatggacacagagagactgagagacgcatgaaaaagtccacatggaaaataaataaatcatatttttgggaaagttacacaaatgtagaacacctaaaataatgcatctagtttccaaataatttggagtttggcccatgcagtctgcatgggaatcaatgatttctctacttcaatgtagttttcttttctacactttccctccaagtcttcattttgcacgaactgttgagcagttatctttaggataatatgtacaaatgttggggtcaaagccttttgacaaagcaaaatatttttagtagattattgtgtttaggatttttttttaatttactttttttctttgggggcttttcttttttattaaattatttcttttgaggcattttgattaaaaaagacacatcttatcataattaaaattcactgtcaataatatttatttttaaataaagattggaaacaaggtcagacacttgtttataaactgtattgtatattgctga

SEQ ID NO: 3 - DNA, 2188 bp, Homo sapiens
accgcctgcgccgcggcgagtgaggcgtcgtccgtactggaggctagctcttgtcgcggccgcggcgagwtarcatcgtttttccaatctgtccgcggctgccgccacccaagacagagccagaaygttcaggatgctgaacagcagttttgaggatgaccccttcttctctgagtccattcttgcacaccgagaaaatatgcgacagatgataagaagtttttctgaaccctttggaagagacttgctcagtatctctgatggtagagggagagctcataatcgtagaggacataatgatggtgaagattctttgactcatacagatgtcagctctttccagacaatggrccaaatrgtgtcaaatatgagaaactatatgcagaaattagaaagaaacttcggtcaactttcagtggatccaaatggacattcattttgttcttcctcagttatgacttattccaaaataggagatgaaccgccaaaggtttttcaggcctcaactcaaactcgtcgagctccaggaggaataaaggaaaccaggaaagcaatgagagattctgacagtggactagaaaaaatggctattggtcatcatatccatgaccgagctcatgtcattaaaaagtcaaagaacaagaagactggagatgaagaggtcaaccaggagttcatcaatatgaatgaaagygatgctcatgcttttgatgaggagtggcaaagtgaggttttgaagtacaaaccaggacgacacaatctaggaaacactagaatgagaagtgttggccatgagaatmctggctcccgagaacttaaaagaagggagaaacctcaacaaagtccagccattgaacatggaaggagatcaaatgttttgggggacaaactccacatcaaaggctcatctgtgaaaagcaacaaaaaataaatagccatgcatttgatttgtttagttttgattgttttaacagttagtaatggtgctgggtaataagcataagaccaatctcttgctgttaaatcagttctgtccttggcaactttcttctgatatctgaatgttcatgaaggtcctagctttatattgtccctcttttaggaataaaattttgattttcaacaatgtgagtaaattgagtctatttaatrtaaaactctttaaaacatactaattttttaaagcttatatgcttatttcgcttccccagttgtttttgtgttggctaaatattcttttatatttatcaagattgattgcagagcagttctatcacttataattagttataagaaattataatgttaaaaaagtctcagtttttactaacactgtactagggtgatattaataaaggtttaaataatttatctctaattttataatgtgttgtaaagccaactagcttaaaactttaaaaataataaagcaaaactacactagtactcttttatgagaaaatagttactattttgataaagggcaaggataatcaaatagttcattttcagagaaaaatattttaaattgctaatgtacatgattgttttggttataatttatttatagaatgtatcttttctatattacattcttaatattcrccagatattatattgaccattctctttaacttcttaatgtggcatatttcwactctcctttcccacaaacagcttcatctgtctccaaggttaacattctgaagctggagagtccttggagaaactctgctcagcttttttgtgacatttagaaaaatgcatttggtattctccaaaccagaatgatacattgtctcaaaatctgttagacagctgatgggtgtttttgagcaacgtcttaataattcagttgtttctgttttaattataccattaaaaatcagctttagctttttaattctagaatttaagcatcagtctgttcttataaaagttaggtttgaagtttataagaatrtaaaatcttaactcacatttgttgtttaatatttctgtcaaggaaaaaagcccccaaaaattgctatcactctataatcctaagtatttttcttttcaattttgtaagtaaaattatatgactatgttcatacttctctaattttttatataatatttttgttaattttactagtttgtgttttatgcctttagtcattaaaataaaatgcaaatgtgttaattc

SEQ ID NO: 4 - DNA, 2160 bp, Homo sapiens
catcgtttttccaatctgtccgcggctgccgccacccaagacagagccagaaygttcaggatgctgaacagcagttttgaggatgaccccttcttcagtgagtccattcttgcacaccgagaaaatatgcgacagatgataagaagtttttctgaaccctttggaagagacttgctcagtatctctgatggtagagggagagctcataatcgtagaggacataatgatggtgaagattctttgactgcaacgagttgttctcttgtgccttttggcgattttggtggtatgcatacagatgtcagctctttccagacaatggrccaaatrgtgtcaaatatgagaaactatatgcagaaattagaaagaaacttcggtcaactttcagtggatccaaatggacattcattttgttcttcctcagttatgacttattccaaaataggagatgaaccgccaaaggtttttcaggcctcaactcaaactcgtcgagctccaggaggaataaaggaaaccaggaaagcaatgagagattctgacagtggactagaaaaaatggctattggtcatcatatccatgaccgagctcatgtcattaaaaagtcaaagaacaagaagactggagatgaagaggtcaaccaggagttcatcaatatgaatgaaagygatgctcatgcttttgatgaggagtggcaaagtgaggttttgaagtacaaaccaggacgacacaatctaggaaacactagaatgagaagtgttggccatgagaatmctggctcccgagaacttaaaagaagggagaaacctcaacaaagtccagccattgaacatggaaggagatcaaatgttttgggggacaaactccacatcaaaggctcatctgtgaaaagcaacaaaaaataaatagccatgcatttgatttgtttagttttgattgttttaacagttagtaatggtgctgggtaataagcataagaccaatctcttgctgttaaatcagttctgtccttggcaactttcttctgatatctgaatgttcatgaaggtcctagctttatattgtccctcttttaggaataaaattttgattttcaacaatgtgagtaaattgagtctatttaatrtaaaactctttaaaacatactaattttttaaagcttatatgcttatttcgcttccccagttgtttttgtgttggctaaatattcttttatatttatcaagattgattgcagagcagttctatcacttataattagttataagaaattataatgttaaaaaagtctcagtttttactaacactgtactagggtgatattaataaaggtttaaataatttatctctaattttataatgtgttgtaaagccaactagcttaaaactttaaaaataataaagcaaaactacactagtactcttttatgagaaaatagttactattttgataaagggcaaggataatcaaatagttcattttcagagaaaaatattttaaattgctaatgtacatgattgttttggttataatttatttatagaatgtatcttttctatattacattcttaatattcrccagatattatattgaccattctctttaacttcttaatgtggcatatttcwactctcctttcccacaaacagcttcatctgtctccaaggttaacattctgaagctggagagtccttggagaaactctgctcagcttttttgtgacatttagaaaaatgcatttggtattctccaaaccagaatgatacattgtctcaaaatctgttagacagctgatgggtgtttttgagcaacgtcttaataattcagttgtttctgttttaattataccattaaaaatcagctttagctttttaattctagaatttaagcatcagtctgttcttataaaagttaggtttgaagtttataagaatrtaaaatcttaactcacatttgttgtttaatatttctgtcaaggaaaaaagcccccaaaaattgctatcactctataatcctaagtatttttcttttcaattttgtaagtaaaattatatgactatgttcatacttctctaattttttatataatatttttgttaattttactagtttgtgttttatgcctttagtcattaaaataaaatgcaaatgtgttaattc

SEQ ID NO: 5 - DNA, 2816 bp, Homo sapiens
atggaggccagtaccatcgatgactcrggacayttactagccaactccccgacttcagacatattttgttccaaaatggcatcttacctttatggagtactctttgctgttggcctctgtgctccaatctactgtgtgtccccggycaatgcccccagtgcatacccccgcccttcctccacaaagagcayccctgcctcacaggtgtattccctcaacaccgactttgccttccgcctataccgcaggctggttttggagaccccgrgtcagaacatcttcttctcccctgtgagtgtctccacttccctggccatgctctcccttggggcccactcagtcaccaagaccsagattctccagggcctgggcttcaacctcacacacacaccagagtctgccatccaccagggcttccagcacctggttcactcactgactgttcycagcaaagacctgaccttgaagatgggaagtgccctcttcgtcmagaaggagctgcagctgcaggcaaatttcttgggcaatgtcaagaggctgtatgaagcagaagtcttttctacagatttctccaacccctccattgcccaggcraggatcaacagccatgtgaaaaagaagacccaagggaaggttgtagacataatccaaggccttgaccttctgacggccatggttctggtgaaycacattttctttaaagccaagtgggaraagccctttcaccytgaatatacaagaaagaacttcccattcctggtgggcgagcaggtcactgtgcawgtccccatgatgcaccagaaagagcagttcgcttttggggtggatacagagctgaactgctttgtgctgcagatggattacaagggagatgccgtggccttctttgtcctccctagcaagggcaagatgaggcaactggaacaggccttgtcagccagaacactgakaaagtggagccactcactccagaaaaggtggatagaggtgttcatccccagattttccatttctgcctcctacaatctggaaaccatcctcccgaagatgggcatccaaaatgyctttgacaaaaatgctgatttttctggaattgcaaagagagactccctgcaggtttctaaagcaacccacaaggctgtgctggatgtcagtgaagagggcactgaggccacagcagctaccaccaccaagttcatagtccgatcgaaggatggyccctcttacttcactgtctccttcaataggaccttcctgatgatgattacaaataaagccacagacgttcccagaattgacctgacaaatattgaccaggttgctgtsatcttcaaacaccattttcctgtgggtagaggtgatgcagtgctgaagacctgggcccctgctcagtgcctttgctctagaatgggtccagcttggctttggctactgggaacagggatcctggcctctgtccactgtcagccccttcttgcccatggagataaaagtctgcaggggcctcaaccccccaggcatcagctctcagagccagcccccgcctaccacagaatcacacccaccattaccaattttgctttgcgtttgtataaagagctggcagcagacgcccccggaaacatcttcttctcgccagtgagcatctccaccaccctggccctgctctctcttggggcccaagctaacacctcagctctgatcctggagggcctgggattcaacctcacagaaacccctgaagccgacatccaccagggcttccggagcctcctccacaccctkgccctgcccagccccaaactcgaactaaaagtaggaaactccctgttcctagacaagcgactaaagyctcggcagcactatttggacagcatcaaggagctttatggagcttttgctttttctgccaacttcacagattctgttacaactgggaggcagattaatgactatttgagaaggcaaacatacgggcaagtcgtggactgcctcccggagttcagccaggacacgttcatggttcttgccaattacatcttcttcaaagccaagtggaagcaccctttcagtcgctaccagacccagaagcaggmaagtttctttgtggatgagaggacttctctccaggtccccatgatgcaccaaaaggaaatgcacagattcctctatgaccaggatttggcttgcacygtcctccagatagaatacagaggaaatgccttggcgctgctggtcctccctgacccggggaaaatgaagcaggtggaggctgctctgcagccacagaccctgagaaaatggggccaattgctcctgcccagtctgttggatttgcacttgccaaggttttcaatttctggaacatataacctggaagacatacttccccaaattggtctcaccaacatactcaacttagaagctgacttctcaggagtcactgggcagctcaacaaaaccatctccaaggtgtcacacaaggcgatggtggacatgagtgagaaggggaccgaggccggggctgcttcaggcctcctctcccagcccccatctctgaacaccatgtcagacccacatgcccacttcaacaggcctttcctcttgctcctttgggaggtcaccacccagagcttactcttcctgggaaaagttgtcaacccagttgcagggtaaccatggtgggaggccaggagttatcttatctcatcctggaccaaacagataggccagaaccagcctgcatcctggggctgctatgtggttcagttaatcagtgtgccaagattctaataaagttgaccttgggttctgtg

SEQ ID NO: 6 - DNA, 9467 bp, Homo sapiens
cagagctcaaacttagagctgctatcggaggaggattttagatttaggaaattctcagcagagcatccgaggggcttttgaaaaattcaattctttagacgctcatgaagaaatcagggatttcctcagacagggtctccctctgttgcccaggctggagtgcattggtgcaatcacagttcactgcaaccttgacttcccgggctcaagcgatcctcctgccttggcctcttgaggagctgggactacagtgctgggtcctgccaccaccatggttccagtggttgagctttgctgaagcccaggcatcatgtacagtgtagaagacctcctgatctctcatggatacaagctgtcaagagaccccccagcatcacgcgaggataaccccaaggggcgccaggcagcgaggactgggacacgagcaggccagggcctgcagaacgggcatgaggatggccctgcggccctcgcacatcgtaagacgtccgcggggaaaggacatgtgagtgactccgaaagccgccgcagcacaccgagaggccacggggagccccagagcacttctgcttccagaacctcggaggcggggttttgtaatcaacccccctcagcatggtcctctcatcccccgactggtaacgaccaagcctaccggagaagaggacggcaagaagccagragccagaagccgagggagcacgaaaacctggaggccagaggaatggcccaagcccacagcctgcctgtccacgtgagggagggtccatgggaagttggaggaaggtcagrgcatgtgatgaakaagccagtttgggaagaagaattgcgaatgtcaggtcctgccaagtggcagaacgtcagcctggaaagctggaaccagccaaggaaattagggaggcagatgtctgatggagatggggagagactgtttcaagacctgtacccattcattcaaggagaacatgtgttgaattctcaaaacaaagggaagtctcgctcactgcctagagttctttcccccgagagcctgagttgcacrgaaattcccattccattaaatgaaagacattcacctaaaatgccaccgtatcctcccacttgcgcaccaaatttggactccacgaggaattctgagaagagtggctgctcagccccatttccccggcctaagtttgggaggcccctcaagcccccatcttacagctcgcaccagcagtctaggggaggagcggacagcagtgactctcaggacagccagcagatggacgcctatgtccccaggcatgagctctgcctgtcagaccctggattggaacctccagtgtacgtgcctccgccctcatacagatcgcccccgcagaacatcccaaacccctacttggaagacacggtgcccataaatgtgtgtggcggtcacagtcaacagcagtctccraccgagaaggctggggccagcggtcagcctccttcaggcccccctggaactgggaatgagtatggtgtgagcccccgcttgcctcagggsctcccyrcacatccccgaccygtcactgcctaygayggcttcgttcagtacattccctttgatgatccacggttacgacattttaaactagctcagccccagggtttctgtgaagacataaagcttgacgataaatcatataactccagtcctgtcactgctcaagagccggctcatggaggaatgcagcctgatggtgccatttggaatccacagagcttaatacccccgtcgggggatgasagaggcctggtcttggccrattccagcccccggtggctgtggggccagccccccggggatggggaaaacagtggcctccccaaccagagagaccgctgtgtggcaaggggacagtggcctgatgtgagaggcagccagcacgggcacactggaagacaagtttcctccccwtactcacagggcgagagcacctgcgaaactcaaaccaagctcaaaaagttccaaactgggactcggaccaagaaaagttcaaagaaaaaaatgaacgaractatattttgcttggtttctatcccagtgaaatcagaatcacatctgccagatagagatatggacaacaatgacttaaagcccagtgctgatcaaaagaatgggtctgataagagcccggctctgcaagaacagagtctgctgagcatgtcttccaccgacctggagctgcaggccctcacaggaagcatgggtgggagaacggagttccaaaaacaagatctaggggaaccagaagaagacagacaaacaaatgacctcagtttcatccaycttacaaagcacagagaactcaagcattctggctcttggccagggcaccggtacagagatcagcaaacacaaaccagtttctccgaggagccccaaagttcgcagctgctccctggtgcaaagctgggagggccgagtcgtgcagcattgagtccaraatgttcagaccctgctgcctccgmagctcagacgcacacagcrttccctaccggtgatcacaaacagaggccaagtgcccgtaacctgaaaggtcacaggtccctcagcccatccagcaacagtgcgttctcaaggacttccttgtccgtggaccaggcaccgacgccaaaagcaggccgaagtcagccctgcgtggatgtccacgggcttggagcccaccctgggcctaagcgggaggtggtgaagggggagcccacgggcccttgcaacagtaaacaactctttgggcagtttctcctgaaaccggtcagccgtcgtccctgggatttgatcagtcagttagaaagttttaacaaggagctccaggaagaggaagaaagcagcagtagcagcagcagcagcagcagcagcagtgaggaragtgaggcggagccgcagcaggagaaccgtgctcactgcagacaggaggatgtgggcttccgcggaaacagcccggaaatgagggttgagccacagccgaggatgtgggtgccggagagccctgtgtgtaggtcgggaagaggtgagagtaagtctgagagctggagtgaggagctgcagcctggccacccacgtgcctggcctccatccccgggccgctttcgcgtggaagaaggtggcggtgcacctttctgctcagcagatggaagcacgagtgcagagaagrgacacctggaggttagcaacggaatggacgagctggcaggtagcccatttcctgtgacgagaatgtcttcaagatcaagtgacgcaaaaccactgcccgcgtcctatccagctgaacctagggagccccaggaaastccgaaaatcaccagtgctttcagctctgtgaaaccaagtgaagcggtccctcggaagtttgacagtggtggagagaggggggcagggctcccactgtccctgtctaacaagaaccgagggctctcagctccagacttacggtctgtggggctcacccctgggcaagaacagggtgccagtgagctagaggggtctttgggtgaagcaagcacaatagaaatccccccaggtgagtccttgcaagccagggctgcaaggatcctgggcattgaggtggsggtggagtccctcctgccgggcatccggagagcgggacagaaccagcctgctgagcccgatgcaagtgcctgcaccccagagtccccccaggaagagttgctatctcgcccagcacyggcagatgtccccagggtgtccactgatgccttttatggcaggaggaagtgcggctggaccaagagccctctctttgtaggggacagggacagtgccaggcgggctcctcaggcttttgagcactcagatgtggacggggttgtcaccagcacagaccctgtccctgagcctgagcccagccccttggagtccaagttcttcgaacaaaaggatgtggaaacaaaaccacccttcaggtccactttattccattttgtagaaagaaccccaagtgtggcaggctctgaaaagagacttagaagcccttccaaagtgattgaaagtttacaagagaaactggcctccccgcctaggagagcagaccctgaccgcctgatgagaatgaaagaggtgagctcagtgtcacggatgagagtcctgagcttcaggaatgccractcccaggaggacgccgaggaattgaaggccaycacaaggggccaggccgggctcccgggaggccttgtgtctcctggcagtggggaccgtgcccagagattgggccactcactctctgtgtccaaggacagcatctccagggaagagaaggagcatccggcagcacaaaaggagaagagcatggatcaagacttctggtgcccagattcctatgaccctagcagagtggagagggtgtgatgaaatgycggtggagcttgcattccgttgcgaattgagtattctcaagtagctggtagatttagtctatcagccccacttccccatgtagaagctggaagctgctgagtttttagcatcctgataacattctttaccactgccactaggaaacttgccatcctctcagaattgctttgtggcgataaagcaatcgtccgttgaaaccatctgtttttatagcatgaagatttaatgcctataattaggaaggagttttcacagaaaccctccctcatgacagatttgactaagctggtaaatagtttggtgttgctctcattctgggtgaagatttcaatgtggaagatctagcaaatgctttggaaaggcctgtgaatggtgtgctcccctctgtgtctccatggcctgcagtccatgctcttgtgaaggagkttgggacactggctgttgcccggtgtttcagcactttcagtttaggggaaatgtgaatcaataggtatgatccatttctaatcaatttggccttctgctgctggaagtaactttacttataagtaacttgccatcagagaataaaagcaatatcttttaagttcctgaaaaattaaaacttgtactgtaatatactaagagtattatttatctggcagtgaaatattttgatcatttgcaaacacgccattgtctgctttgcactcagtattatctatttttattttctgtatgggtatttagaaattctttatatgaaaaataattgctggtttaaaatagaccattttaacaaagtgactatatttctttttacgaaaatgctatttttctatgatgtaaacaattgttaggcggcagatttttaaggaagtattattttatttaagagtctgtatccctttgtgtgagaggaacccaaagagggttcacttttgctttaaagctctgtcccttacccactgacaactctgctacttttattttatcttagaaaatgtcaatatagacatatcacagggttaataaaagaaacttttcacaaagatttttgtacaagtgtagctatcaggttatatttgaaaataaccctctgaaaaccagccaacattgtcatgacaatttttgctgccgtatcaactagaattaccaaaaaacatagttttatctttgtatgtgtgtggggatctaccctgagaccatgcttttcttcccaccctgccaccccacccctttaaagaaatacgtatttttatctagaatgatcttgaattagtctctgcatatttttagaaagtgcttggggacattatatatatgccattacaaaagcattatgaggcctatgtattctactgtgtttaatactgcattaacctgcacaaagtttatgcattttttcatgcatttttttccttctttctaagtaaggtattcctgacaactaacattccctaaatcatttcccctccctccctccctccctyccttccttycttccttycttctgtcctccctcccttgctacctcttgccctccttccttcaccctgtcctccttttcccttttattttttccccttctctttcattttmttttcttttagagaaaccaccttatctatttttagacatttcgaattcctaaaatgtgaacygttgggtgatctgtcctttggccctaaaacggctggccgggctgtcccggcctgttctcatctgtaccgtatgattttatttcataataactttatgtatttggactgtaacaaacaaaacagaacctaagtcgccccgaaaaatctttccaagccttttcaaaacacttatctgcagtccagaattcagctcttatgaaaagtgagagtgcactccagttttcacagcagcaataagtgcrggaaacaaaaagatcctcttcccaggaaaagttgagtggggaagagttcagacactgttgtagctggtgaatcattgaagtcacctggtagtaccaaataagggctgaggcgcctggaggtctttgtggggtcttccctctttaaatgcaaacgtaagaaggtatatgtgtatatacatttatatacgtgcacatgtatactcgtacatgtatgcacacatacccatacatgtatatgaactccgttctgatttcctctgaaattttgttgataccatctaaatacctctttgaatcaaaataacttaattttagctcattcctcaagagaaagagaaggatccccaaggaagaaaaactgttgtaccttctgtgattctcaaaccaaaatgtgatgcgcttctgttttgttatcttaaattgttgtatcatatctttctgaaaccattctgaattaagttgaaattttcaacatttatactttaactgttctaaatttaagcctacatgtaaatcttttttggggggaaggtaacttgaaaagtttaacttgaaaatttgacctttaaactttcatattctaaggtaaataatagcctataacyaacaacagctttcccagaggtcttgaatttaacactaattgtttagttattgtttctatttctcatacatacataacttcgttttttgtggctggaagaaaaagtttctatattttgtatttgtctttgttcttctcatgcacacaatttactgttggtgtttaataatttggagctcataaarttaaaagttgtaattttgaccatttgggctaaaaattatatgagggattacatatgcaatggattagtatttcttgatttgcaaaagaagggaaaatgatggtaatttagctcaaattgcctttctttgaagaaaatttctgaatgactgaaaaccaaatatctatattatcactttcaacctcatgtttctgcaaagtacagaaaaactcctcactgacagtgcacccagcccctgactgggttttcaggattatgtccatgtgcataactgcttggatttcttcttttaaagtccctaaaacatgaatctgttctttgagatcctggtttccttagcagagttgtaggttgcgggtttcattcacgtggaaattctaagtagaacttttgctgccccattttactgttggtgaagggccgttgttaatggaagtttacgttttaaaactcagatgactcagaaaccagactgtgatcattttttgcagcagcaaaatgacttattctgacagcatctcggtttggggcttctgaagaaaaaggatgaagctgatctgttgaaacwactactttcccaactcggaggcaaaaggggctgatagaagataacattcacctaccatttcatcttgtgacccccagagatcacgtttgcgtgttctggctgagttttttattattgtttgttttaaatgrttaaataatacacaattaaatgtcaggatagcatctcttgcaaagtgaccagtgcagcagaattgtctttctatccatatttgagcttagagaaacatttcccatgtcctaagttcttagaagcaattactttagcgttggggagcattgttctaccagacccatttatgcaggggagatgaagcttaaaagacgggatgtggggtgggagtgtgtttcttaagccgaagctgttgcaggctgggggatttttgcattttctttttgttttgtttttgactgcagattctgtacatctgtctgtgggaggagagttgctactcaggacaggatttaagagacacattccagtgacctttaagaatctgcatggcgggaggtccttctccaggagtgtgggttggtccactctgggacccaccacactaagaagggggagatgataaaataacattaaaggaagaatggcctccagcctgcaggttttgttggaaagaaataaaaagggagtcattaagaccataaattcagattgaggcctcttgaaaaggttgatgtgggctagcaacctgcctgtcgaaacagtccttggttcatcagcagtgtgggaaggcagccaaggctcctgcagattcctggcatcgaccttggaaagcctctgcgatacttgtgtgtacgaatacagcagaggacagggaggtccttgttctgtggtctctgtttagtgactgaaacttaaacccaaaggcaagcccagattgtctggccgttcatccccatgctttgataggggttaggaggaaccctttccgtatgaaagacaggccctactagggcttacaaccaagccaaaggaccatctcttctttcttccacctcccttcacccctgccccrcagcagagccgagatgtgagacattcattgtcacggagcaaggagacaaaggcaagttcaagttgagaagcatatggcagcaaacagaaatgaaaaccatatgtcccagcaaggggaaaagcagtcatttccagattataaaaatcaatgaagtactctccacctaggtcagctgaaattcgagccctcacagtcaggcctgtcagagaagttaagcagaaacatctcggggggacttctaaaatttagtgaagacaaggccttgcaactccaaagaaactttttttcccccccttgaaacagggtcttgctctgttgcccagcctggagtgcagtggtrcagtcacggctcactgcagcctcaagctcctgggctcaagcactatccccacctcaacctccttagtagctgggactacaggtgcacaccaccatgcccagctaaccacagaaactttcatctcttcattttttctttgggcaccattaatacctaagacaggtagaaagggtcccagaaagacaccattggtaatggccgattgccggctgcagtcatcgcccccagatcaggctggtacaggatgccttaaggtgatgagaggtgagggtgcatgaagaataatgagcacagggaagagagaagcaggacaaagtagcagataaaatgccggcaaagcacagatgaatgtcttcaagaagctcttgtatttctctgcacagtgtaaatatccttgctatttcaggatggcrgctggcctgctcagtaacatacatgttccaaataaagattttgcatg

SEQ ID NO: 7 - DNA, 423 bp, Homo sapiens
atggcttggaccagggctgagcagtgtgggtggcaagaagcgtgttcagatttggaggttttgccaatgggacctgctgaygaaaagccctctccattgaatggtagtaggagggagaggagaaagaacattccrtctgactttgagccaggacttgaagcagacactatggctcatgcagaaaagaaacttcttcccacaagactgccagcgaaattttgcagactcaagatgttcggagagtttggacaatcatcacagtttttggacgcctatctgagaccatcttctgtgaagtttattcagctcataagtgtgaataaaaaattgctaaatgtgaactcaaagagacagtgcagttttacatctgagtscactgaatgcatcacagaagcagcatgtgcagcaacaggagtccaatag

SEQ ID NO: 8 - DNA, 391 bp, Homo sapiens
atgtacacctgtgccaagtgtgttcccacctttctcygtttgagagcacctgtcaggtgctaagcccaccactctctgcagtagttctcaagcaaccagagayactaacagaygagagcttcagcagtttggcagccccacatcccccgacctcacttaaccctagtcacagcttccaaaccagcaccacttyaagggatattggcatagcagccaagttcattggggctaggacttccaaagtcaggacagctggctctggggctaaaattgcagctgtgtttgggagcctcaccattgattatgccaagaaccctgtctgaagcaacaagtcttctcctatgccattctggggctttgcactctatatatgtcagttttttgctgctta

SEQ ID NO: 9 - DNA, 705 bp, Homo sapiens
atgcctctgaacktggctcttcagaagcaagcctctctaaaggaggcctttgaagaaaaggcgagtgatcagaataaagagagggagcgggggtggggagggggcgggagcaccgastggctgtctgactcctccggtcagaggtaccagaataggctaaatatccccagcrgctgccatcccagcgggtgggatgasagcgagcctgagctctgctcccttgatctcctctgcgtctctgctggatggcagggccagccycgggacaaaatccaaatgttggtcaaagtcctttttctcccagacatgttcacacgtgggtgcaagctgatctccattgtcagtacacagatgcccatgawtaatgccgtggatatacacatgtgtgttgcacaagctacacaagctaaagctggtaacccaaccctgaagaccctcacgagctgctgtgggggatcttggcaaccacccttccttgccagccaggtcctcactgytrgagcagtggatatatttatggatcygaagctttgccatgaagaggcaccatgcacctcctcattcccatctctcaacatttccayggcctctggagatagtcctctcttgttcttgttctatgtaaaagacctggagtctgacccctttgtccccatggakgtaacaggatactggaagagacttttcctggtaccccagaattga

SEQ ID NO: 10 - DNA, 1014 bp, Homo sapiens
atgggtgttcacaatttgttcacggtgactcagtttatccttatagggctctcttacttctccaatgagcactaccttctttttgtggcccttgccattatctgtcaggtgttcttggtgcgaagtggagacattctcttggccattgggactgtgattaagttgcacactactcatgtattattttttggcaaatgtgtccatcttagacatattgtgttcatcagctactatacctaagatgcctaagattctctagactgaggatcacagcatttcttttgttaggtgagctttgcagccctatttcctagtggcctgggctgggaagaaagctttctcactgttacggcttatgactggtgtgtggtcacatgtttctccctttgttacatcctgatcatgaacaaattggctctgtccagctggtttatgggacctgagcagctgggtttctaaatttcctcctcctccacgtagtgtctaccctctgcctgtctttctgcaagcctgatcgagttaaccagtattactgtgatatctcaccratgggggccctgttgtgccagtccatgcacctggcaaacatgcttgttttagtggaatcagttatcttggggatcagtgcttttctggctgcctttaacttttacatatacatcatctccactatcctaaagatccagtgtgtagagtggagtgcaaagtgcttctctacatgcacttcccacctccttacggtctgtttgttctatggcatattgacatttacctacatttactccttctccagtcaacactcacatgtctaaggcaagcccagatctagccacagacaggctcatctctatgctatacagagttattaccctgatgtttaacttcatcactgacaacctgagaaacacagaggtaaaaggagcctcagaaaggttttatgtcattgaacatgtttatagaaaccataatttaaaatataatagaatgactcaatgttccacttttaattcatag

SEQ ID NO: 11 - DNA, 924 bp, Homo sapiens
atgaatcacagcgttgtaactgagttcattattctgggcctcaccaaaaagcctgaactccagggaattatcttcctcttttttctcattgtctatcttgtggcttttctcggcaacatgctcatcatcattgccawaatctataacaacaccttgcatacgcccatgtatgttttccttctgacactggctgttgtggacatcatctgcacaacaagcatcataccgaagatgctggggaccatgctaacatcagaaaataccakttcwtatgcaggctgcatgtcccagctcttcttgttcacatggtctctgggagctgagatggttctcttyaccaccatggcctatgaccgctatgtggccatttgtttccctcttcattacagtactrttatgaaccaccatatgtgtgtagccttgctcagcatggtcatggctattgcagtcaccaattcctgggtgcacacagctcttatcatgaggttgactttctgtgggccaaacaccattgaccacttcttctgtgagatacccccattgctggctttgtcctgtagccctstaagaatcaaygaggtgatggtgtatgttgctgatattaccctggccataggggactttattcttacctgcatctcctatggttttatcattgttgctattctcygtatccgcacagtagaaggcaakaggaaggccttctcaacatgctcatctcatctcacagtggtgaccctttactattctcctgtaatctacacctatatccgccctgcttccagctatacatttgaaagagacaaggtggtagctgcactctatactcttgtgactcccacattaaacccgatggtgtacagcttccagaatagggagatgcaggcaggaattaggaaggtgtttgcatttctgaaacactag

SEQ ID NO: 12 - DNA, 1451 bp, Homo sapiens
ccakcctttctttgcggaatcaccatggcggctgggaccctgtacacgtatcctgaaaactggagggccttcaaggctctcatcgctgctcagtacagcggggctcagrtccgcgtgctctccgcaccaccccacttccattttggccaaaccaaccgcaccyctgaatttctycgcaaatttcctgccggcaaggtcccagcatttgagggtgatgatggattctgtgtgtttgagagcaacgccattgcctactatgtgagcaatgaggagctgcggggaagtactccagaggcagcagccmaggtggtgcagtgggtgagctttgctgattccgatatagtgcccccagccagtacctgggtgttccccaccttgggcatcatgcaccacaacaaacaggccactgagaatgcaaaggaggaagtgaggcgaattctggggctgctggatgcttacttgaagacgaggacttttctggtgggcgaacgagtgacattggctgacatcacagttgtctgcaccctgttgtggctctataagcaggttctagagccttctttccgccrggcctttcscaataccaacygctggttcctcacctgcattaaccagccccagttccgggctgtcttgggsgaactgaaactgtgtgagaagatggcccagtttgatgctaaaaagtttgcagagacccagcctaaaaaggacacaccacggaaagagaagggttcacgggaagagaagcagaagccccaggctgagcggaaggaggagaaaaaggcggctgcccctgctcctgaggaggagatggatgaatgtgagcaggcgctggctgctgagcccaaggcyaaggaccccttcgctcacctgcccaagagtacctttgtgttggatgaatttaagcgcaagtactccaatgaggacacactctctgtggcactgccatatttctgggagcactttgataaggacggctggtccctgtggtactcagagtatcgcttccctgaagaactcactcagaccttcatgagctgcaatctcatsactggaatgttccagcgactggacaagctgaggaagaatgccttcgccagtgtcatcctttttggaaccaacaatagcagctccatttctggagtctgggtcttccgaggccaggagcttgcctttccgctgagtccagattggcaggtggactacgagtcatacacatggcggaaactggatcctggcagmgaggagacccagacgctggttcgagagtacttttcctgggagggggccttccagcatgtgggcaaagccttcaatcasggcaagatcttcaagtgaacatctcttgccatcacctagctgcctgcacctgcccttcagggagatgggggtcattaaaggaaactgaacattgaaaaaaaaaaaaaaaaaaaaaagactggatccaattg

SEQ ID NO: 13 - DNA, 3975 bp, Homo sapiens
ctgtgtgtrttcctggtctgcggcagccatgctgaactcgtatggagaggcgagtgggggggacagagtcsaggacygcgggataggaagctggggatatggacaagcagcagcgttatagcgctctgggtttcgggacataggcctgggccatgcggcccccttggccccttggcgcgacccccaggaacgttcggaaagctggtcctcgtggctgggggaaaggcggggggtgggggggaagcgggcacgtgaccccggtcagccaatctgggtgctgctgacgtacgcgcgcggccccgatgctctccccacccccccagcccgttcgggaagggaggggctgggggctacgccccmtcccccagcacggcttcgttttctgggggggggttgacaccccggattacataccccgtaccaagccgagggcaactttggaggccccctggaaggctttaggatccagattcttcgctgctgctgccttaccgccgagaaccaccacccgccaggcgtcttgcggccacacccctggcgggttcaggcaggctacgcccacgcgacccctcccgtttccctgctttggccaatggaggagctacgaatggcacgacctgctcgagcttggcagtctccagttgggctgtgcatggaagcttgggaagactttgttggaaggggaggcggggagagagtgctggaggctctggggcgatggcttccgcacctcttccaaccaccctctttccctggagtcggcggaccacagctcagccaattggcttggagatgtggcgggttgccacttccctgtgggtctctgcggcactcttcygcctggtgactgacaccttggaaatgaagtttatgacgtcatcgytgcggctggccaatagaaaaagctcccgcggagagrtgttccttccccttcgactcagcttcttcacccgcgtgagcgagcgcgcgcgcgcggagggggtggggaaaakctcaagcagggtggcgcgcatgagcggcgaagctcctcctccccgcctatatataaagggctggcgcggggctcggcggcgccatttcgtgctggagtggagcagcctctagaacgagctggargattctgcctaccgatacagagccttcgagtcgtccggggccgccattacaatccacctccatccgcttggaaatggccttcgtcccggcctatgactggtcccagcgggcagtacagaccccytagaagcccctggagctcccctttttcgggccccgcccaatcctcggagtctgtccaccccctctactccgccctcaagaggatttcaaagatggaggcggcggctccctaaaccactttkcgtgttcatccgcctccatccgagatcgaaacgggacctcgtcggccccgtaggrgcccgacaagaagagggaatccctgcagaccaacagcgggctatattgacgacggtgtctgagatcggggaccgtcttttgaagagtcagtccctccttagttgcccgcctcagctgaggccgccgccattttcttgctgtccgccgtctgcagagcgcgccaagctgcccggagctctccgagaggccccaaagagactgctttcgtgccggccaggcagggggtttgtcgcctggaggcccaagaggaacggcctccccccaacttagcgggttatgctggaccgggcggtgagggraacygaggccacccggactttccgcggctgagggcagcgccggttccttgcggtcaagatgctgcaaaacgtgactccccacaataagctccctggggaagggaatgcagggytgctggggctgggcccagaagcagcagcaccagggaaraggattcgaaaaccctctctcttgtatgagggctttgagagccccacaatggcttcggtgcctgctttgcaacttacccctgccaacccaccacccccggaggtgtccaatcccaaaaagccaggacgagttaccaaccagctgcaatacctacacaaggtagtgatgaaggctctgtggaaacatcagttcgcatggccattccggcagcctgtggatgctgtcaaactgggtctaccggattatcacaaaattataaaacagcctatggacatgggtactattaagaggagacttgaaaayaattattattgggctgcttcagagtgtatgcaagattttaataccatgttcaccaactgttacatttacaacaagcccactgatgatattgtcctaatggcacaaacgctggaaaagatattcctacagaaggttgcatcaatgccacaagaagaacaagagctggtagtgaccatccctaagaacagccacaagaagggggccaagttggcagctcctccagcccagccccttgccaagaaaaaaggcgtaaagcggaaagcagatactaccacccctacacctacagccatcttggctcctggttctccagctagccctcctgggaaacagttaaaacattgcaatggcattttgaaggagttactctctaagaagcatgctgcctatgcttggcctttctataaaccagtggatgcttctgcacttggcctgcatgactaccatgacatcattaagcaccccatggacctcagcactgtcaagcggaagatggagaaccgtgattaccgggatgcacaggagtttgctgctgatgtacggcttatgttctccaactgctataagtacaatcccccagatcacgatgttgtggcaatggcacgaaagctacagcttcgggcagtacatgaacaactggctgctctgtcccagggtccaatatccaarcccaagarraaaagagagaaaaaagagaaaaagaagaaacggaaggcagagaagcccccacctgccctgcctacaggttatgattcagaggaggaggaagagagcaggcccatgagttacgatgagaagcggcagctgagcctggacatcaacaaattacctggggagaagctgggccgagttgtgcatataatccaagccagggagccctctttacgtgattcaaacccagaagagattgagattgattttgaaacactcaagccatccacacttagagagcttgagcgctatgtcctttcctgcctacgtaagaaaccccggaagccctacaccattaagaagcctgtgggaaagacaaaggaggaactggctttggagaaaaagcgggaattagaaaagcggttacaagatgtcagcggacagctcaattctactaaaaagcccccyaagaaagcgaatgagaaaacagagtcatcctctgcacagcaagtagcagtgtcacgccttagcgcttccagctcyagctcagattccagctcctcctcttcctcgtcgtcrtcttcagacaccagtgattcagactcaggctaaggggtcaggccagatggggcaggaaggctccgcaggaccggacccctagaccaccctgccccacctgccccttccccctttgctgtgacacttcttcatctcaccccccccygcccccctctaggagagctggctctgcagtgggggagggatgcagggacatttactgaaggagggacatggacaaaacaacattgaattcccagccccattggggaccctgatctggagttacctgaggccayagctgccctattcacttctaagggccctgttttgagattgtttgttctaatttwttttaagctaggtaaggctggggggagggtggggccgtggtcccctcagcctccatggggagggaagaagggggagctctttttttacgttgatttttttttttctactctgttttccctttttccttccgctccatttggrgccctgggggtttcagtcatctccccatttggtcccctggactgtctttgttgattctaacttgtaaataaagaaaatattattcaagttttgagttacctt

SEQ ID NO: 14 - DNA, 4786 bp, Homo sapiens
ctgtgtgtrttcctggtctgcggcagccatgctgaactcgtatggagaggcgagtgggggggacagagtcsaggacygcgggataggaagctggggatatggacaagcagcagcgttatagcgctctgggtttcgggacataggcctgggccatgcggcccccttggccccttggcgcgacccccaggaacgttcggaaagctggtcctcgtggctgggggaaaggcggggggtgggggggaagcgggcacgtgaccccggtcagccaatctgggtgctgctgacgtacgcgcgcggccccgatgctctccccacccccccagcccgttcgggaagggaggggctgggggctacgccccmtcccccagcacggcttcgttttctgggggggggttgacaccccggattacataccccgtaccaagccgagggcaactttggaggccccctggaaggctttaggatccagattcttcgctgctgctgccttaccgccgagaaccaccacccgccaggcgtcttgcggccacacccctggcgggttcaggcaggctacgcccacgcgacccctcccgtttccctgctttggccaatggaggagctacgaatggcacgacctgctcgagcttggcagtctccagttgggctgtgcatggaagcttgggaagactttgttggaaggggaggcggggagagagtgctggaggctctggggcgatggcttccgcacctcttccaaccaccctctttccctggagtcggcggaccacagctcagccaattggcttggagatgtggcgggttgccacttccctgtgggtctctgcggcactcttcygcctggtgactgacaccttggaaatgaagtttatgacgtcatcgytgcggctggccaatagaaaaagctcccgcggagagrtgttccttccccttcgactcagcttcttcacccgcgtgagcgagcgcgcgcgcgcggagggggtggggaaaakctcaagcagggtggcgcgcatgagcggcgaagctcctcctccccgcctatatataaagggctggcgcggggctcggcggcgccatttcgtgctggagtggagcagcctctagaacgagctggargattctgcctaccgatacagagccttcgagtcgtccggggccgccattacaatccacctccatccgcttggaaatggccttcgtcccggcctatgactggtcccagcgggcagtacagaccccytagaagcccctggagctcccctttttcgggccccgcccaatcctcggagtctgtccaccccctctactccgccctcaagaggatttcaaagatggaggcggcggctccctaaaccactttkcgtgttcatccgcctccatccgagatcgaaacgggacctcgtcggccccgtaggrgcccgacaagaagagggaatccctgcagaccaacagcgggctatattgacgacggtgtctgagatcggggaccgtcttttgaagagtcagtccctccttagttgcccgcctcagctgaggccgccgccattttcttgctgtccgccgtctgcagagcgcgccaagctgcccggagctctccgagaggccccaaagagactgctttcgtgccggccaggcagggggtttgtcgcctggaggcccaagaggaacggcctccccccaacttagcgggttatgctggaccgggcggtgagggraacygaggccacccggactttccgcggctgagggcagcgccggttccttgcggtcaagatgctgcaaaacgtgactccccacaataagctccctggggaagggaatgcagggytgctggggctgggcccagaagcagcagcaccagggaaraggattcgaaaaccctctctcttgtatgagggctttgagagccccacaatggcttcggtgcctgctttgcaacttacccctgccaacccaccacccccggaggtgtccaatcccaaaaagccaggacgagttaccaaccagctgcaatacctacacaaggtagtgatgaaggctctgtggaaacatcagttcgcatggccattccggcagcctgtggatgctgtcaaactgggtctaccggattatcacaaaattataaaacagcctatggacatgggtactattaagaggagacttgaaaayaattattattgggctgcttcagagtgtatgcaagattttaataccatgttcaccaactgttacatttacaacaagcccactgatgatattgtcctaatggcacaaacgctggaaaagatattcctacagaaggttgcatcaatgccacaagaagaacaagagctggtagtgaccatccctaagaacagccacaagaagggggccaagttggcagcgctccagggcagtgttaccagtgcccatcaggtgcctgccgtctcttctgtgtcacacacagccctstatactcctccacctgagatacctaccactgtcytcaacattccccacccatcagtcatttcctctccacttctcaagtccttgcactctgctggacccccgctccttgctgttactgcagctcctccagcccagccccttgccaagaaaaaaggcgtaaagcggaaagcagatactaccacccctacacctacagccatcttggctcctggttctccagctagccctcctgggagtcttgagcctaaggcagcacggcttccccctatgcgtagagagagtggtcgccccatcaagcccccacgcaaagacttgcctgactctcagcaacaacaccagagctctaagaaaggaaagctttcagaacagttaaaacattgcaatggcattttgaaggagttactctctaagaagcatgctgcctatgcttggcctttctataaaccagtggatgcttctgcacttggcctgcatgactaccatgacatcattaagcaccccatggacctcagcactgtcaagcggaagatggagaaccgtgattaccgggatgcacaggagtttgctgctgatgtacggcttatgttctccaactgctataagtacaatcccccagatcacgatgttgtggcaatggcacgaaagctacaggatgtatttgagttccgttatgccaagatgccagatgaaccactagaaccagggcctttaccagtctctactgccatgccccctggcttggycaaatcgtcttcagagtcctccagtgaggaaagtagcagtgagagctcctctgaggaagaggaggaggaagatgagkaggacgaggaggaagaagagagtgaaagctcagactcagaggaagaaagggctcatcgcttagcagaactacaggaacagcttcgggcagtacatgaacaactggctgctctgtcccagggtccaatatccaarcccaagarraaaagagagaaaaaagagaaaaagaagaaacggaaggcagagaagcatcgaggccgagctggggccgaygaagatgacaaggggcctagggcaccccgcccacctcaacctaagaagtccaagaaagcaagtggcagtgggggtggcagtgctgctttaggcccttcyggctttggaccttctggaggaagtggcaccaagctccccaaaaaggccacaaagacagccccacctgccctgcctacaggttatgattcagaggaggaggaagagagcaggcccatgagttacgatgagaagcggcagctgagcctggacatcaacaaattacctggggagaagctgggccgagttgtgcatataatccaagccagggagccctctttacgtgattcaaacccagaagagattgagattgattttgaaacactcaagccatccacacttagagagcttgagcgctatgtcctttcctgcctacgtaagaaaccccggaagccctacaccattaagaagcctgtgggaaagacaaaggaggaactggctttggagaaaaagcgggaattagaaaagcggttacaagatgtcagcggacagctcaattctactaaaaagcccccyaagaaagcgaatgagaaaacagagtcatcctctgcacagcaagtagcagtgtcacgccttagcgcttccagctcyagctcagattccagctcctcctcttcctcgtcgtcrtcttcagacaccagtgattcagactcaggctaaggggtcaggccagatggggcaggaaggctccgcaggaccggacccctagaccaccctgccccacctgccccttccccctttgctgtgacacttcttcatctcaccccccccygcccccctctaggagagctggctctgcagtgggggagggatgcagggacatttactgaaggagggacatggacaaaacaacattgaattcccagccccattggggagtgatctcttggacacagagccmccattcaaaatggggcagggcaagggtgggagtgtgcaaagccctgatctggagttacctgaggccayagctgccctattcacttctaagggccctgttttgagattgtttgttctaatttwttttaagctaggtaaggctggggggagggtggggccgtggtcccctcagcctccatggggagggaagaagggggagctctttttttacgttgatttttttttttctactctgttttccctttttccttccgctccatttggrgccctgggggtttcagtcatctccccatttggtcccctggactgtctttgttgattctaacttgtaaataaagaaaatattattcaagttttgagttacctt

SEQ ID NO: 15 - DNA, 4722 bp, Homo sapiens
ctgtgtgtrttcctggtctgcggcagccatgctgaactcgtatggagaggcgagtgggggggacagagtcsaggacygcgggataggaagctggggatatggacaagcagcagcgttatagcgctctgggtttcgggacataggcctgggccatgcggcccccttggccccttggcgcgacccccaggaacgttcggaaagctggtcctcgtggctgggggaaaggcggggggtgggggggaagcgggcacgtgaccccggtcagccaatctgggtgctgctgacgtacgcgcgcggccccgatgctctccccacccccccagcccgttcgggaagggaggggctgggggctacgccccmtcccccagcacggcttcgttttctgggggggggttgacaccccggattacataccccgtaccaagccgagggcaactttggaggccccctggaaggctttaggatccagattcttcgctgctgctgccttaccgccgagaaccaccacccgccaggcgtcttgcggccacacccctggcgggttcaggcaggctacgcccacgcgacccctcccgtttccctgctttggccaatggaggagctacgaatggcacgacctgctcgagcttggcagtctccagttgggctgtgcatggaagcttgggaagactttgttggaaggggaggcggggagagagtgctggaggctctggggcgatggcttccgcacctcttccaaccaccctctttccctggagtcggcggaccacagctcagccaattggcttggagatgtggcgggttgccacttccctgtgggtctctgcggcactcttcygcctggtgactgacaccttggaaatgaagtttatgacgtcatcgytgcggctggccaatagaaaaagctcccgcggagagrtgttccttccccttcgactcagcttcttcacccgcgtgagcgagcgcgcgcgcgcggagggggtggggaaaakctcaagcagggtggcgcgcatgagcggcgaagctcctcctccccgcctatatataaagggctggcgcggggctcggcggcgccatttcgtgctggagtggagcagcctctagaacgagctggargattctgcctaccgatacagagccttcgagtcgtccggggccgccattacaatccacctccatccgcttggaaatggccttcgtcccggcctatgactggtcccagcgggcagtacagaccccytagaagcccctggagctcccctttttcgggccccgcccaatcctcggagtctgtccaccccctctactccgccctcaagaggatttcaaagatggaggcggcggctccctaaaccactttkcgtgttcatccgcctccatccgagatcgaaacgggacctcgtcggccccgtaggrgcccgacaagaagagggaatccctgcagaccaacagcgggctatattgacgacggtgtctgagatcggggaccgtcttttgaagagtcagtccctccttagttgcccgcctcagctgaggccgccgccattttcttgctgtccgccgtctgcagagcgcgccaagctgcccggagctctccgagaggccccaaagagactgctttcgtgccggccaggcagggggtttgtcgcctggaggcccaagaggaacggcctccccccaacttagcgggttatgctggaccgggcggtgagggraacygaggccacccggactttccgcggctgagggcagcgccggttccttgcggtcaagatgctgcaaaacgtgactccccacaataagctccctggggaagggaatgcagggytgctggggctgggcccagaagcagcagcaccagggaaraggattcgaaaaccctctctcttgtatgagggctttgagagccccacaatggcttcggtgcctgctttgcaacttacccctgccaacccaccacccccggaggtgtccaatcccaaaaagccaggacgagttaccaaccagctgcaatacctacacaaggtagtgatgaaggctctgtggaaacatcagttcgcatggccattccggcagcctgtggatgctgtcaaactgggtctaccggattatcacaaaattataaaacagcctatggacatgggtactattaagaggagacttgaaaayaattattattgggctgcttcagagtgtatgcaagattttaataccatgttcaccaactgttacatttacaacaagcccactgatgatattgtcctaatggcacaaacgctggaaaagatattcctacagaaggttgcatcaatgccacaagaagaacaagagctggtagtgaccatccctaagaacagccacaagaagggggccaagttggcagcgctccagggcagtgttaccagtgcccatcaggtgcctgccgtctcttctgtgtcacacacagccctstatactcctccacctgagatacctaccactgtcytcaacattccccacccatcagtcatttcctctccacttctcaagtccttgcactctgctggacccccgctccttgctgttactgcagctcctccagcccagccccttgccaagaaaaaaggcgtaaagcggaaagcagatactaccacccctacacctacagccatcttggctcctggttctccagctagccctcctgggagtcttgagcctaaggcagcacggcttccccctatgcgtagagagagtggtcgccccatcaagcccccacgcaaagacttgcctgactctcagcaacaacaccagagctctaagaaaggaaagctttcagaacagttaaaacattgcaatggcattttgaaggagttactctctaagaagcatgctgcctatgcttggcctttctataaaccagtggatgcttctgcacttggcctgcatgactaccatgacatcattaagcaccccatggacctcagcactgtcaagcggaagatggagaaccgtgattaccgggatgcacaggagtttgctgctgatgtacggcttatgttctccaactgctataagtacaatcccccagatcacgatgttgtggcaatggcacgaaagctacaggatgtatttgagttccgttatgccaagatgccagatgaaccactagaaccagggcctttaccagtctctactgccatgccccctggcttggycaaatcgtcttcagagtcctccagtgaggaaagtagcagtgagagctcctctgaggaagaggaggaggaagatgagkaggacgaggaggaagaagagagtgaaagctcagactcagaggaagaaagggctcatcgcttagcagaactacaggaacagcttcgggcagtacatgaacaactggctgctctgtcccagggtccaatatccaarcccaagarraaaagagagaaaaaagagaaaaagaagaaacggaaggcagagaagcatcgaggccgagctggggccgaygaagatgacaaggggcctagggcaccccgcccacctcaacctaagaagtccaagaaagcaagtggcagtgggggtggcagtgctgctttaggcccttcyggctttggaccttctggaggaagtggcaccaagctccccaaaaaggccacaaagacagccccacctgccctgcctacaggttatgattcagaggaggaggaagagagcaggcccatgagttacgatgagaagcggcagctgagcctggacatcaacaaattacctggggagaagctgggccgagttgtgcatataatccaagccagggagccctctttacgtgattcaaacccagaagagattgagattgattttgaaacactcaagccatccacacttagagagcttgagcgctatgtcctttcctgcctacgtaagaaaccccggaagccctacaccattaagaagcctgtgggaaagacaaaggaggaactggctttggagaaaaagcgggaattagaaaagcggttacaagatgtcagcggacagctcaattctactaaaaagcccccyaagaaagcgaatgagaaaacagagtcatcctctgcacagcaagtagcagtgtcacgccttagcgcttccagctcyagctcagattccagctcctcctcttcctcgtcgtcrtcttcagacaccagtgattcagactcaggctaaggggtcaggccagatggggcaggaaggctccgcaggaccggacccctagaccaccctgccccacctgccccttccccctttgctgtgacacttcttcatctcaccccccccygcccccctctaggagagctggctctgcagtgggggagggatgcagggacatttactgaaggagggacatggacaaaacaacattgaattcccagccccattggggaccctgatctggagttacctgaggccayagctgccctattcacttctaagggccctgttttgagattgtttgttctaatttwttttaagctaggtaaggctggggggagggtggggccgtggtcccctcagcctccatggggagggaagaagggggagctctttttttacgttgatttttttttttctactctgttttccctttttccttccgctccatttggrgccctgggggtttcagtcatctccccatttggtcccctggactgtctttgttgattctaacttgtaaataaagaaaatattattcaagttttgagttacctt

SEQ ID NO: 16 - DNA, 3180 bp, Homo sapiens
tcccagcataaagttgggagtgacaccagagccttctgcaagatgcttctrattctsctgtcagtggccctgctggccttcagctcagctcaggacttagatgaagatgtcagccaagaagacgttcccttggtaatatcagatggaggagactctgagcagttcatagatgaggagcgtcagggaccacctttgggaggacagcaatctcaaccctctgctggtgatgggaaccagaatgatggccctcagcagggaccaccccaacaaggaggccagcagcaacaaggtccaccacctcctcagggaaagccacaaggaccaccccaacagggaggccatccccctcctcctcaaggaaggccacaaggaccaccccaacagggaggccatccccgtcctcctcgaggaaggccacaaggaccaccccaacagggaggccatcagcaaggtcctcccccacctcctcctggaaagccccagggaccacctccccaagggggccgcccacaaggacctccacaggggcagtctcctcagtaatctaggattcaatgayaggaagtgaataagaagatgacagtgtttcaaatgccttgaaacataatgtgatcatgctctaacttcaatataccaataaaataatcagcttgcaatttctgattatagcatctccttctgagtgtttgggactctggaatctgagacccatgttcacattgtaagaacatccaggaccccttctccttgatgtttccagcaagcttctttcctccttatccttattaagtcatctgcctggggaaggagttccactgtttctttccttctctgtcttcttagctcgaatttaaattgcacaattattttcaggtcatttcctgatagtctagtcagcttatgaatgtaagcaaaacaggaccaatgaaagaaagtcccagaagctgagagaaactttaacaagtttgagagtaacttattttgttttctaggaaagtgagtatggttctatgcctgtattccccagaagccactagacctattttcccctattttatcactgatcagttctgtccctgcctatgattcttaccattcttaagaaaacctgaatggatttcatcaaggcggcagcataatttgaagggcaattgcgtgtgaaaattgatgtgacttgatttacacaatagtcagaaaacattttagaaattgatgactttataatgcaaccaggagtattgaaaaaaaagtaagcaatgagctcaaataattaaaaaagagagacaaaatacacttgggagaacagaaataagaattaatgaaaatttaaaagattaaatgaatgagaagaaatgattcataaattttgaactaacagtaataacttcttgaaaatccaataaaattggcaaaagattgtgaaaattctggaagaataagggaaacagataatcttcagagtaatcaggtaaagcttaaacaagtgttttaaaagatgagtttttcctacattctgaaaagcaaacatgaaaaactgaacacagtttttacagatayacaatatggagtgacttatatacaaaatgaccttaaaaatatattaaactcattatagtagttaatatctaagtaaaatatgatgaaatttaatagagaattcactcctcccaaaagcaccttcatggaagattcctcattaacaggcagtcctttagtatgctgatttatacaaaatgctgaaaagaagagaaataccccaagttcttgaaaaaaaattttttgatatgactactctaacagtaataactataaatctcactttaaataatttaaaacaaattaaagtgatatatgagttaaatgaccaagcagacttgattcyaggaatgttaaggaatgtycattatttgttttggataatgaagtcagcagaggaaaaaaaaatatgaccatctcaaaagatgccaacgttgtctttgataatatttaatatattttttaaaaaacaattcttgtaaaatacttttttgattagccttctgaccatgattaaaatggtgtacctcaaagtagctgctaaccttaygtgtatctgcaacaccctgaaaaattatctaatraaaaggcacaaagaaaaagcttgtcaatgttgtggataattagraagtgaataattttatttaatattagataaacaagcacataacagagatacatatattcaaatggaaggastaaaattaccaccacatgcagatctgtttttctgtccagaaaataacaagagattctactcaggtaaaaaaggaaaggaaggaaaaccattgtaattaaaataaaatttaatacaatagccgtttattaattcaacttctaaagaatctttgtgattacacaatgaccagctagtaaatataataagaaaatgattattcacaaaggaaccaaaaggcctagtcttcgaatttttaatgccattgtgatagcaagcatctgattattttactctaagttatttccacttctgattttaagaacagcttctttcccagggatgggttccccctagtgatgtattctcttcaccacaagagtttgcagctctggctttctttctgctcatctgtaaagataactacagctcctctataaaccatctcaccattattaccgaaatcagacaaattctggagatagtcaaagctgtgaggattcgaagatctctttcacatcttgacccagtcaattccgttcaccagtgttatgaatccattccccaaaattccaattaggaattatatatttattattataatgaggatactatacaaggcatttagcatggctgcaaagagagagctccaatgtctaaatgcaacgctgacaatttcttcatctatcacatgtacctgttatacatacttattaattggatgtgcagttaatttcttcctttaaaaaaaaaactataggctcaatatgaaagtagaaagcactaaggtgtactaatgaatgggcacatagcttttttcacaaaaagattattttgccccagacagctatctgcattctgatccagatactgtatgttcttaacataaagtgaaatttctcatacttcatgatgaaagaaaaaactgaattctcattgttaataaacaaataaagacaattctctgc

SEQ ID NO: 17 - DNA, 1376 bp, Homo sapiens
tcgctgggtgcagagccagaggaacgccagcgaccccagcagcgctgcggacggtgctggccgtggccgctgcggcccccgtgtccaggtgggccaggacgcagcctctgggcgccgtcgcttttccagcatcgcagaggcaaaagcgtggcagtgggacccaaaaggttgcttgaatggggggcaccctggcatggacgctgctgttgccgctgctgctgcgggagtcagacagcctagaaccgtcgtgcaccgtgtcctccgcggatgtggactggaacgcrgagttcagtgccacgtgcctgaatttcagtggcctcagcctgagcctgcctcacaaccagtctctgcgggccagcaacgtgattctccttgacctgtctgggaacggcctgcgagagcttccagtgaccttctttgcccacctgcagaagcttgaggtcctgaacgtgctacgcaaccccttgtctcgtgtggatggggcgctggccgcccgctgtgaccttgacctgcaggccgactgcaactgtgccctggagtcctggcacgacatccgccgagacaactgctctggccagaagcctctgctctgctgggacacaaccagctcccagcacaacctctctgccttcctggaggtcagctgcgcccctggcctggcctctgcaactatcggggcagtggtggtcagcgggtgcctgcttcttggacttgccatcgctggccctgtgctggcctggagactctggcgatgccgagtggccagaagccsggagctgaacaaaccctgggctgctcaggatgggcccaagcccggtttaggcttgcagccacggtacggcagccggagcgcccccaagccccaagtggccgtgmcatcctgcccctccactcccgactatgagaacatgtttgtgggccagccagcagccgagcaccagtgggatgaacaaggggctcacccttcagaggacaatgacttttacatcaactacaaggacatcgacctggcttcccagcctgtctactrtaacctgcagtcactgggccaggccycaatggatgaagaggagtacgtgatccccgggcactgagcctaagatgtcctaacctccacccagaaccccttcagtccctgctgggtgactcagggcgtcctaackcctccatggcctcagtttccccatctgaagaatgggkacaggaaaggattgtccttgaggccccaggaagctctgccgccccctccctgtccctcatgccgctcctcagctccctcagctcctagagggggaagaggagagacccccaacaaggggacaggasggtcactgtgccaatcctgtcatcaccctcctgtggatgtacaggcagtg

SEQ ID NO: 18 - DNA, 1217 bp, Homo sapiens
  misc_feature (1)...(1217): n = A,T,C or G, or insertion/deletion polymorphism (see Tables 1-2)
gaagggagggggcggtcagtggctgggcgccaagccgcctccaccgctgcatcgcccccgccctcccctctcctgccacagcccgccccgcccccgccccagagcgctccccctctctcctcgggggtcgctcggagggaccaccgtctttctggttggagtacagccccgccccgcacccgcttgggttgggagtcctcccacccaaactctccctggcttcttcccagtctgcacggctcgagacggccgctcatccctgctccccgtgtgtccctcggtcctctctgcagctcccagccctcaactccttaccccagtttgggcaaccagctgccccgctgtttggcccaggcctgggccatgacggatgggtgggcgcccggggccgcgagaagggcggaacgctgtgcccagccggagactacgctgggtggcggcggcagcgccgggagtctgcagtgcgcgagggagaagtgagcgcacagcgcccagcgagcaggtgcctgcggcgcggagagcgcacacgctagccagcccgcagcggccgaaagtgaccactgttcctggaggatttgcattgctggagaagtgcattctaacagtggaattcaggcggngagagtcggwcaattcaccgtaccatgtggactccccagtgtggagcagaatctgaggactgacttgctaagaatctctgggcaccctggatagaaccttccctttggctctgagcatggtggctcacacctgagatcccagcacttcggaaggccgaggtgggagaattgcttgaggccaggagttcgagaccagcctaggtaaygtaacgagaccttgtccctacaaaaaattaaaagaaaattacccaagtgtattagtccattttcacactgctatgaagaactgcctgagactgggtaatttataagaaaagaggtttaactgactcacagttcctcatggcaggaaaggcctcaggaaatttatgatcgtggcggaaggggaagcaggcacgtcttacgtggcggtaggtgagagaggatgtgtaggaagtgaaagggtaagagccccttataaaaccatcaratctcatgagaaatcactctctatcatgaggacagcatgggggaaccacccccatgatccaaacacgtcccaccaggtctttccctcaacacctggggattacaatttaagatgagatttggtgggga

SEQ ID NO: 19 - DNA, 1467 bp, Homo sapiens
gtaaatggggaggaaatgctggggaggtgggggcagatcacatcaacatcctggcattgggctgggtcggcgtggagccccagaaatgttcccaagcccattcttaccaagaacyaatgagtaaaatcaggggcctcccacctgaggtcagggaaccaggccctggagtggaacttggggtggaaaatggccttctttgtcaactgattcattctccagaattcaatttgttctccaactcggtggtgtttgaaagcaactttatccaggtcactaagcccgggaactggagagatgtctgtgaagggtctgccaccgtgatcctcggggtsacctcctcggtgccctccctgccactccccaatgtcctcctgatggccaatgttacctggccccagggtccatttaccacctggagcacacctggtgwcgccccagtcatcaacctcagcaggcttctccccctgaagtacgtggagctacgaatctacgacyggctccagcgcatcctgagggttaggacagtgaccgaaaagatctactatctgaagctccacgaaaaacacccagagattgtgtttcaattctgggtccgcttggtgaaaattctgcagaaaggcctgtccatcaccaccaaagacccgagaatcaaattcactcactgcctggtgcccaagatgcccaccaactccacagaaacaacacccagcgagcccctcgtgctgctggcggctgagcagaccagtggcagtttctcacagctctcaggaaagccccagctcacrgcagacaggaacaatgacactgccrttgaaatagacaactgcagcagctacaagataccctctccagtggcatctccaatcaatttgaatatacccatgagagctgccttgagccacagcctctgggaacaagaggactggaatgagcaccttctacaagttcatatagccagttacctaggagagcacttcttgggagcctgacacctaggcaaaacatgctcttccttgcatacgtgtacttgctaccacctcttataatgctccttttccactgtgagccaagtgaccttgggagagagcaactttttgacacataaatctgacagaaaggaccaggcacggtggctcatacctgtaatcccagcactttggaaggccaaggtgggcagatcacttgaagtcagaagtttgagaccagcctggccaacatggtgaaaccctgtctctactaaaaatgtgaaaattagccaggtgtggtggtgcgcgtctgtagtcccagctactcaggaggctgaggcaggagaatctcttgaactggggaggcagaggttgcagtgagccgagatcactccactgcgctctagcctgggcaacagagcaagattccatctcaaaaaaaaaaaaaawatatctgactgagtttcctccttaataaaaccagaccctttgacatgaaatg

SEQ ID NO: 20 - DNA, 2437 bp, Homo sapiens
tcgataaaaaccgattgtaacactactggaatacaggccgcgaggctatgcgttcagatctggagaccctgctgggacagaccagagataattctgtctcgctcacctggctttggcaacggaccgccccggtgcacgaagcgcagggcggtcgcaggagctggctgagcagcgaagcccaggccctcctgggaagaagtccgagcaggggcatcgcgcggcaggacgccggctttccgggacaggaacaaaaggcctgggaaggaggcgggtcagacaccaggaagggtggagggcactgcaaaggcggaacccgcgcaccagggaaaactcgggcgtttgcgcacctcactagtcacgaaggctgaggtgggatcctcccaagttcccttagtagccagcttcggcacttccgggaggagccggaaataatttttgtgctcggcggaggctctctaggcgtgcgacccagcgactcgatagccggaagtcatccttgctgaggctggggcaaccaccgcaggtcgagacagcaggcggctcaagtggacagccgggatggcagagcgtgcggcgctggaggagctggtgaaacttcagggagagcgcgtgcgaggcctcaagcagcagaaggccagcgccgagctgatcgaggaggaggtggcgaaactcctgaaactgaaggcacagctgggtcctgatgaaagcaaacagaaatttgtgctcaaaacccccaagggcacaagagactatagtccccggcagatggcagttcgcgagaaggtgtttgacgtaatcatccgttgcttcaagcgccacggtgcagaagtcattgatacacctgtatttgaactaaaggaaacactgatgggaaagtatggggaagactccaagcttatctatgacctgaaggaycagggcggggagctcctgtcccttcgctatgacctcactgttccttttgctcggtatttggcaatgaataaactgaccaacattaaacgctaccacatagcaaaggtatatcggcgggataacccagccatgacccgwggccgataccgggaattctaccatgtgattttgacattgctgggaactttgatcccatgatccctgatgcagagtgcctgaagatcatgtgygagatcctgagttcacttcagataggcacttcctggtcaaggtaaacgatcgacgcattctagatgggatgtttgctrtctgtggtgtttctgacaycaagttccgtaccatctgctcctcagtagacaagctggacaaggtgtcctgggaagaggtgaagaatgagatggtgggagagaagggccttgcaccwgaggtggctgaycgcattggggactatgtccagcaacatggtggggtatccctggtggaacagctgstccaggatcctaaactatcccaaaacaagcaggccttggagggccygggagacctgaagttgctctttgagtacctgaccctatttggcattgatgacaaaatctcctttgacctgagccttgctcgagggctggattactacactggggtgatctatgaggcagtgctgctacagaccccagcccaggcaggggaagagcccctgggtgtgggcagtgtggctgctggaggacgctatgatgggctagtgggcatgttcgaccccaaagggcgcaaggtgccatgtgtggggctcagcattggggtggagcggattttctccatcgtggaacagagactagaggcyttggaggagaagatacggaccacggagacacaggtgcttgtggcatctgcacagaagaagctgcsagaggaaagactaaagcttgtctcagaactgtgggatgctgggatcaaggctgagctgctgtacaagaagaacccaaagctactgaaccagttacagtactgtgaggaggcaggcatcccactggtggctatcatcggcgagcaggaactcaaggatggggtcatcaagctccgttcagtgacgagcagggaagaggtggatgtccgaagagaagaccttgtggaggaaatcaaaaggagaacaggccagcccctctgcatctgctgaactgaacaaactatcagaggaaaggaagtgggactggcactatttgaggttaagacaaactgcatatgtacttcaattgctttgcacttttccgtttcagcggaagacctgaagagtggtcagaacagagcctttgatttttattatggttattttattgattattactggcaaaaacggccaggtacaacacctttttcatacaaggcccaggaggcttagtccagtctgtgctcctgggctacaaggacccagcctgagatggtcccatcygcagggccccgcaccagttggagcagatgcctccccacmaccaattgccaaaggtccaataaaatgcctcaaccamgg

SEQ ID NO: 21 - DNA, 2559 bp, Homo sapiens
tcgataaaaaccgattgtaacactactggaatacaggccgcgaggctatgcgttcagatctggagaccctgctgggacagaccagagataattctgtctcgctcacctggctttggcaacggaccgccccggtgcacgaagcgcagggcggtcgcaggagctggctgagcagcgaagcccaggccctcctgggaagaagtccgagcaggggcatcgcgcggcaggacgccggctttccgggacaggaacaaaaggcctgggaaggaggcgggtcagacaccaggaagggtggagggcactgcaaaggcggaacccgcgcaccagggaaaactcgggcgtttgcgcacctcactagtcacgaaggctgaggtgggatcctcccaagttcccttagtagccagcttcggcacttccgggaggagccggaaataatttttgtgctcggcggaggctctctaggcgtgcgacccagcgactcgatagccggaagtcatccttgctgaggctggggcaaccaccgcaggtcgagacagcaggcggctcaagtggacagccgggatggcagagcgtgcggcgctggaggagctggtgaaacttcagggagagcgcgtgcgaggcctcaagcagcagaaggccagcgccgagctgatcgaggaggaggtggcgaaactcctgaaactgaaggcacagctgggtcctgatgaaagcaaacagaaatttgtgctcaaaacccccaagtagagacgaggtttcaccatgttggccaggctggtctcgaacccctgacctcaggcaatccatctgccttggcctcccgaagtgctgggattacaggcgtgagccactgtgcctggcctcagggcacaagagactatagtccccggcagatggcagttcgcgagaaggtgtttgacytaatcatccgttgcttcaagcgccacggtgcagaagtcattgatacacctgtatttgaactaaaggaaacactgatgggaaagtatggggaagactccaagcttatctatgacctgaaggaccagggcggggagctcwtgtcccttcgctatgacctcactttccttttgctcggtatttggcaatgaataaactgaccaacattaaacgctaccacatagcaaaggtayatcggcgggataacccagccatgaccctggccgataccgggaattctaccagtgtgattttgacattgctgggaactrtgatcccatgatccctgaygcagagtgcctgaagatcatgtgcgagatcctgagttcacttcagataggcgacttcctggtcaaggtaaacgatcgacgcattctagatgggatgwttgctatctgtygtgtttctgacagcaagttccgtaccatctgctcctcagtagacaagctggacasggtgtcctgggaagaggtgaagaatgagatggtgggagagaagggycttgcacctgaggtggctgaccgcattggggactatgtccagcaacatggtggggtatccctggtggaacagctgctccaggatcctaaactatcccaaaacaagcaggccttggagggcctgggagacctgaagttgctctttgagtacctgaccctatttggcattgatgacaaaatctcctttgacctgagccttgctcgagggctggattactacactggggtgatctatgaggcagtgctgctacagaccccagcccaggcaggggaagagcccctgggtgtgggcagtgtggctyctggaggacgctatgatgggctagtgggcatgttcgaccccaaagggcgcaaggtgccatgtgtsgggctcagcattggggtggagcggattttctccatcgtggaacagagactagaggctttggaggagaagatacggaccacggagacacaggtgcttgtggcatctgcacagaagaagctgctagaggaaagactaaagcttgtctcagaactgtgggatgctgggatcaaggctgagctgctgtacaagaagaacccaaagctactgaaccagttacagtactgtgaggaggcaggcatcccactggtggctatcatcggcgagcaggaactcaaggatggggtcatcaagctccgttcagtgacgagcagggaagaggtggatgtccgaagagaagaccttgtggaggaaatcaaaaggagaacaggccagcccctctgcatctgctgaactgaacaaactatcagaggaaaggaagtgggactggcactatttgaggttaagacaaactgcatatgtacttcaattgctttgcacttttccgtttcagcggaagacctgaagagtggtcagaacagagcctttgatttttattatggtyattttattgattattactggcaaaaacggccaggtacamcacctttttcatacaaggcccaggaggcttagtccamtctgtgctcctgggctacaaggacccagcctgagatggtcccatctgcagggccccgcaccagttggagcagatgcctccccaccaccaattgccaaaggtccaataaaatgcctcaaccacgg

SEQ ID NO: 22 - DNA, 2458 bp, Homo sapiens
cggagtgccaggctactcctcccgcagtgtgggtggttccgaggctgactaccctgmggcggcgcggytcgcagtccttctcagcatggaccgcacttgtgaggagaggcccgctgaggatgggagcgacgaggaggacccagactccatggaagccccaacccggatccgggacactccggaagacatcgtgctggaagctccggctagtgggctggcgttccatccggccygtgacctactggctgcaggggacgtggacggggacgtgttcgtcttttcctactcttgccaagagggagaaaccaaggagctctggtcatcaggtcaccatctcaaggcctgccgagctgtggccttctctgaagatgggcagaagctcattactgtctccaaggacaaagccatccatgttctagatgtggagcagggccaactggaaagacgtgtttccaaggctcatggtgcccccatcaayagtcttctgctggtggatgagaatgttctggccactggggatgacacaggtggtatcygtctctgggaccagcggaaggagggccccttaatggatatgaggcaacatgaagagtacatcgcagacatggctctggatccagccaaaaagctgctgctgacagccagcggggatggctgccttggcatcttcaacattaagaggcgtcggtttgagctgctctcagaacctcagtytggggacctgacctctgtcactctcatgaaagtacagctggttatgtgggggaagaaggtagcctgtggctccagtgaaggtaccatctrcctcttcaattggaatggctttggggccacaagtgaccgctttgccctgagagctgaatctatcgactgcatggttccagtcacmgagagtctgctgtgtactggctccactgatggagtcatcagggctgtgaacatcctaccgaaccgagtggtgggcagtgtgggccagcacactggggagcctgtggaggagctggccctctcccactgtggccgcttcctggccagtagtggccatgaccagcgcctcaagttttgggacatggcccagctgcgagctgtggtggtggatgactaccgtcggcgcaaaaaaaagggaggaccactgcgggctytgagcagcaagacttggagcaccgatgacttyttcgcaggactgagrgaagagggagaagactccatggctcaggaagaaaaggaggagactggggatgacagtgactgaaggaatgaattgaatcttgagaygggtcctcaccagggtgcctgtggagaaagaatggagtcactgtttaaccatggtacctgcctcagccccagcagaccacaggaggttggccccagactcamtgagtgcctgcagcagccgtacagacacagcatccttggccacctcatgcccatcccggccatctagggtcagcacaacccagatgaggccgctgaagggcaccggatgcccaggaatcaccacctggtaccagaagcggtgccagccagcaggtcctatgcccaaacacttggtgaggaacacagggctgcccagcttcattcgttggcacagcaactgcagggtagcccgagccccttggaaccctaacttgtcccttgccaaagccaactggctgccctctggctgtggggaccgcaagaagggacccacaagctgctggcgaagtcgctgcttcaggtctggcttgagccactccacagccacctgctctccacagaggtgtgactgccctgtaggaaaaatgcaaagacaagggcaggtctaaaccctgggcccaagcctccaggtggtgagccctttggagctacacagtcctgttatttgtagccttcccatttcctggtagtgtgaccatgggtaagaaaagacaatgaagccttcagcctccattatttgcaaagggagtataacacactgctaccttacaagtttccttggagaagtactggttaattgcaggctttgtctgcctcataaccatcataatggctaatctttactgggaaaacttgctgtaagtcagtcagtgtgctaagtaccgtacacccattatgttacttaattctcataacagtctgaggaaacagattctatagtagtaaaaagctcagttggattcccttgagcaaatcaatttctctaacagtttcctcatagcttgagggtcctgtgcctattttgcggtgtgggggtgggggaaggttgagaattaagtcaggaggtaatgctcgggaagtgtcacaaatttaggtaagcggtggtggtagcaccattggaagttttaaaaatctgagatcaaatagtaaaaggttgcaaattctggcatgtttgactctaagatcttgtaactttaacagctatgctcagtataaagtgcygggcagaacgcgtttggccccaaccagcacccccgcccca

SEQ ID NO: 23 - DNA, 2943 bp, Homo sapiens
cttttcctactcttgccaagagggagaaaccaaggagctctggtcatcaggtcaccatctcaaggcctgccgagctgtggccttctctgaagatgggcagaagctcattactgtctccaaggacaaagccatccatgttctagatgtggagcagggccaactggaaagacgtgtttccaaggctcatggtgcccccatcaayagtcttctgctggtggatgagaatgttctggccactggggatgacacaggtggtatcygtctctgggaccagcggaaggagggccccttaatggatatgaggcaacatgaagagtacatcgcagacatggctctggatccagccaaaaagctgctgctgacagccagcggggatggctgccttggcatcttcaacattaagaggcgtcggtttgagctgctctcagaacctcagtytggggacctgacctctgtcactctcatgaaatgggggaagaaggtagcctgtggctccagtgaaggtaccatctrcctcttcaattggaatggctttggggccacaagtgaccgctttgccctgagagctgaatctatcgactgcatggttccagtcacmgagagtctgctgtgtactggctccactgatggagtcatcagggctgtgaacatcctaccgaaccgagtggtgggcagtgtgggccagcacactggggagcctgtggaggagctggccctctcccactgtggccgcttcctggccagtagtggccatgaccagcgcctcaagttttgggacatggcccagctgcgagctgtggtggtggatgactaccgtcggcgcaaaaaaaagggaggaccactgcgggctytgagcagcaagacttggagcaccgatgacttyttcgcaggactgagrgaagagggagaagactccatggctcaggaagaaaaggaggagactggggatgacagtgactgaaggaatgaattgaatcttgagaygggtcctcaccagccccagcagaccacaggaggttggccccagactcamtgagtgcctgcagcagccgtacagacacagcatccttggccacctcatgcccatcccggccatctagggtcagcacaacccagatgaggccgctgaagggcaccggatgcccaggaatcaccacctggtaccagaagcggtgccagccagcaggtcctatgcccaaacacttgctatgctcagtataaagtgcygggcagaacgcgtttggccccaaccagcacccccgccccagcctaccttccaccagggcctttttggccatggcagcggcccggtgcgagctgaatttgagcagagcgatctgcccgggcgccggtccggggctgggcagcagccgcgcctcctgcaagccgggacccagcggctgcagcgcgagcagcagcgcgctgcgggtcagattcggcggcaggccgtcaacgctcagctcacacttctcggtgctgcggcacacgagcagcgggcaggacggccgcagcggrtggttgtgcagcgtggcgatggcggcctgcgcgccgcgcctcgagctgtagcgggcataggcgaagccgcggttcaggccgctgaaggtcatcatcaggcggaactcgtagaggcggcccacgcgctggaacagcgggataagctggtgctcgtacacgtcctgaggcagccgcccgatgaacacctctgacccagctggcggcgggctgcccacccagcctgtgggaagagggtatgcaaggccaccgtcaggcgacgctttcgaattctgagcccacggacccagcgcgcgggggtgggaggcgatgtgaacaaaggtctgtgaaatgggtttacacccgtaccctgggtggttggcataattaggtgactgcgctaacaagggggctggcacagagtaggtacaccttgagattggccccctccctcgacggggcgggtggacgtggagccacagttcctcctttgctggggggtataaatccgggtagttcgcagtttctgacagtgaaggctcggagcagcccctcccccaaagggggctggtgtagccggacaggcggaggggctgggactaccgtacctgggggtggcccgccatacttcctctgcccgttcacctgcaccaggcggatgcctgtctccctgacccacgcctccagcgccgccttgttctctggattcaccctctcacaccacagctgagagggaaaggaaggttggaatggcggatcgccaagcgcgcccccacctctcctgtggtactggggtccctaaagccgacccccgctccggcggggctcgccggcccccaagtcgccagccgcttacctcacaatcccgcttggactgcatggctctccagctggccccctcgtaccctctttataacttcctccccaccggcctctggaagcttccctacccctccaccccgcaagctctcattggctctgagcgcgaccccgcctcccaggggggtggaggtatccactgcacgtgcgccgcccgggcttcgctcagaccttcaggtgaaagctgcaaagtcgcgggtgcgtatgtacgggggctgcctcccsaggaggagctcccaagccgcagggtggacgctggagacaagaacctcagggtcacaagtttactgtttttctcccttttccatccctacattggtctgctggggaaggcggggctaggcatcactgacacacgcagactccgkggttgaggcattttattggacctttggcaattggtggkggggaggcatctgctccaactggtgcggggccctgcaratgggaccatctcaggctgggtccttgtagcccaggagcacagactggactaagcctcctgggccttgtatgaaaaaggtgttgtacctggccgtttttgccagtaataatcaataaaataaccataat

SEQ ID NO: 24 - DNA, 2531 bp, Homo sapiens
cggagtgccaggctactcctcccgcagtgtgggtggttccgaggctgactaccctgmggcggcgcggytcgcagtccttctcagcatggaccgcacttgtgaggagaggcccgctgaggatgggagcgacgaggaggacccagactccatggaagccccaacccggatccgggacactccggaagacatcgtgctggaagctccggctagtgggctggcgttccatccggccygtgacctactggctgcaggggacgtggacggggacgtgttcgtcttttcctactcttgccaagagggagaaaccaaggagctctggtcatcaggtcaccatctcaaggcctgccgagctgtggccttctctgaagatgggcagaagctcattactgtctccaaggacaaagccatccatgttctagatgtggagcagggccaactggaaagacgtgtttccaaggctcatggtgcccccatcaayagtcttctgctggtggatgagaatgttctggccactggggatgacacaggtggtatcygtctctgggaccagcggaaggagggccccttaatggatatgaggcaacatgaagagtacatcgcagacatggctctggatccagccaaaaagctgctgctgacagccagcggggatggctgccttggcatcttcaacattaagaggcgtcggtttgagctgctctcagaacctcagtytggggacctgacctctgtcactctcatgaaagtacagctggttatggtgggatggaggggtgtgtgctgggggcttagtctgaggcagcttccacattgttttctctatttccctgcagtgggggaagaaggtagcctgtggctccagtgaaggtaccatctrcctcttcaattggaatggctttggggccacaagtgaccgctttgccctgagagctgaatctatcgactgcatggttccagtcacmgagagtctgctgtgtactggctccactgatggagtcatcagggctgtgaacatcctaccgaaccgagtggtgggcagtgtgggccagcacactggggagcctgtggaggagctggccctctcccactgtggccgcttcctggccagtagtggccatgaccagcgcctcaagttttgggacatggcccagctgcgagctgtggtggtggatgactaccgtcggcgcaaaaaaaagggaggaccactgcgggctytgagcagcaagacttggagcaccgatgacttyttcgcaggactgagrgaagagggagaagactccatggctcaggaagaaaaggaggagactggggatgacagtgactgaaggaatgaattgaatcttgagaygggtcctcaccagggtgcctgtggagaaagaatggagtcactgtttaaccatggtacctgcctcagccccagcagaccacaggaggttggccccagactcamtgagtgcctgcagcagccgtacagacacagcatccttggccacctcatgcccatcccggccatctagggtcagcacaacccagatgaggccgctgaagggcaccggatgcccaggaatcaccacctggtaccagaagcggtgccagccagcaggtcctatgcccaaacacttggtgaggaacacagggctgcccagcttcattcgttggcacagcaactgcagggtagcccgagccccttggaaccctaacttgtcccttgccaaagccaactggctgccctctggctgtggggaccgcaagaagggacccacaagctgctggcgaagtcgctgcttcaggtctggcttgagccactccacagccacctgctctccacagaggtgtgactgccctgtaggaaaaatgcaaagacaagggcaggtctaaaccctgggcccaagcctccaggtggtgagccctttggagctacacagtcctgttatttgtagccttcccatttcctggtagtgtgaccatgggtaagaaaagacaatgaagccttcagcctccattatttgcaaagggagtataacacactgctaccttacaagtttccttggagaagtactggttaattgcaggctttgtctgcctcataaccatcataatggctaatctttactgggaaaacttgctgtaagtcagtcagtgtgctaagtaccgtacacccattatgttacttaattctcataacagtctgaggaaacagattctatagtagtaaaaagctcagttggattcccttgagcaaatcaatttctctaacagtttcctcatagcttgagggtcctgtgcctattttgcggtgtgggggtgggggaaggttgagaattaagtcaggaggtaatgctcgggaagtgtcacaaatttaggtaagcggtggtggtagcaccattggaagttttaaaaatctgagatcaaatagtaaaaggttgcaaattctggcatgtttgactctaagatcttgtaactttaacagctatgctcagtataaagtgcygggcagaacgcgtttggccccaaccagcacccccgcccca

SEQ ID NO: 25 - DNA, 2319 bp, Homo sapiens
aacgcaaagcagtgtgggttgattctgaggtgcactgtgggaaagagcttgtcgctgcggtgttgytgttggagactcgattgttggtgacagcgaaagaacgataacaaaatgccggagcgagatagtgagccgttctccaaccctttggcccccgatggccacgatgtggatgatcctcactccttccaccaatcaaaactcaccaatgaagacttcaggaaacttctcatgacccccagggctgcacctacctctgcaccaccttctaagtcacgtcaccatgagatgccaagggagtacaatgaggatgaagacccagctgcacgaaggaggaaaaagaaaagttattatgccaagctacgccaacaagaaattgagagagagagagagctagcagagaagtaccgggatcgtgccaaggaacggagagatggagtgaacaaagattatgaagaaaccgagcttatcagcaccacagctaactatagggctgttggccccactgctgaggcggacaaatcagctgcagagaagagaagacagttgatccaggagtccaaattcttgggtggtgacatggaacacacccatttggtgaaaggcttggattttgctctgcttcaaaaggtacgagctgagattgccagcaaagagaaagaggaagaggaactgatggaaaagccccagaaagaaaccaagaaagatgaggatcctgaaaataaaattgaatttaaaacacgtctgggccgcaatgtttaccgaatgctttttaagagcaaagcatatgagcggaatgagttgttcctgccgggccgcatggcctatgtggtagacctggatgatgagtatgctgacacagatatccccaccactcttatccgcagcaaggctgattgccccaccatggaggcccagaccacactgaccacaaatgacattgtcattagcaagctgacccagatcctttcatacctgaggcagggaacccgtaacaagaagcttaagaagaaggataaagggaagctggaagagaagaracctcctgaggctgacatgaatatttttgaagacaytggggattacgtaccctccacaaccaagacacctcgggacaaggagcgggagagatatcgggaacgggagcgtgatcgggaaagagacagagaccgtgaccgagagcgagagcgagaacgagatcgggaacgagagcgagagcgggaccgagagagagaagaggaaaagaagagacacagctactttgagaagccaaaagtagatgatgagcccatggacgttgcaaaggacctgggtctaccaaggagttgatcaagtccatcaatgaaaagtttgctgggtctgctggctgggaaggcacacatatgctgaagaagccagaagacaaaaagcagctgggagatttctttggcatgtccaacagttatgcagagtgctacccagccacgatggatgacatggctgtggatagtgatgaggaggtggattatagcaaaatggaccagggtaacaagaaggggcccttaggccgttgggactttgatacccaggaagaatacagcgagtatatgaacaacaaagaagctttgcccaaggctgcattccagtatggtatcaaaatgtctgaagggcggaaaaccaggcgcttcaaggaaaccaatgacaaagcagagcttgatcgccagtggaagaagattagygcaatcattgagaagaggaagaagatggaagctgatggggttgaagtcaaaagaccaaaatactaatcactagttacaaccagagatgctccacaaggatatgctccccackgwtttctttctacaatttccaaaggttgcaagatgtttttttgtggatgaatataaaattttattgtgtaattacttggttccattaaaattggttaacttgctattttcttkgttgagcatgtcccctccagtgcccttgaagcaccaagaacactaattccactggttgtgtaaaatcacatgcagaaagtcatcagtcctttcctgagctgtggttctagattcctagacagtaaggatgctctctagccagtgtgcccagtagagaagagaataatgatcctcactgatgggcaagaggtggatagaggaatgtaagtatgattggtctcaaatgtcagactcattccggcccatcttcaggcctagtccctggggaaagatttcctggggattgctgtcagcctgatgggctgctaatctgatctccaggctatgaaggactgggctctggatgaaggcatctaatgaaaatcacttatgggtg

SEQ ID NO: 26 - DNA, 2325 bp, Homo sapiens
aacgcaaagcagtgtgggttgattctgaggtgcactgtgggaaagagcttgtcgctgcggtgttgytgttggagactcgattgttggtgacagcgaaagaacgataacaaaatgccggagcgagatagtgagccgttctccaaccctttggcccccgatggccacgatgtggatgatcctcactccttccaccaatcaaaactcaccaatgaagacttcaggaaacttctcatgacccccagggctgcacctacctctgcaccaccttctaagtcacgtcaccatgagatgccaagggagtacaatgaggatgaagacccagctgcacgaaggaggaaaaagaaaagttattatgccaagctacgccaacaagaaattgagagagagagagagctagcagagaagtaccgggatcgtgccaaggaacggagagatggagtgaacaaagattatgaagaaaccgagcttatcagcaccacagctaactatagggctgttggccccactgctgaggcggacaaatcagctgcagagaagagaagacagttgatccaggagtccaaattcttgggtggtgacatggaacacacccatttggtgaaaggcttggattttgctctgcttcaaaaggtacgagctgagattgccagcaaagagaaagaggaagaggaactgatggaaaagccccagaaagaaaccaagaaagatgaggatcctgaaaataaaattgaatttaaaacacgtctgggccgcaatgtttaccgaatgctttttaagagcaaagcatatgagcggaatgagttgttcctgccgggccgcatggcctatgtggtagacctggatgatgagtatgctgacacagatatccccaccactcttatccgcagcaaggctgattgccccaccatggaggcccagaccacactgaccacaaatgacattgtcattagcaagctgacccagatcctttcatacctgaggcagggaacccgtaacaagaagcttaagaagaaggataaagggaagctggaagagaagaracctcctgaggctgacatgaatatttttgaagacaytggggattacgtaccctccacaaccaagacacctcgggacaaggagcgggagagatatcgggaacgggagcgtgatcgggaaagagacagagaccgtgaccgagagcgagagcgagaacgagatcgggaacgagagcgagagcgggaccgagagagagaagaggaaaagaagagacacagctactttgagaagccaaaagtagatgatgagcccatggacgttgcaaaggacctgggtctaccaaggagttgatcaagtccatcaatgaaaagtttgctgggtctgctggctgggaaggcacagaatcacatatgctgaagaagccagaagacaaaaagcagctgggagatttctttggcatgtccaacagttatgcagagtgctacccagccacgatggatgacatggctgtggatagtgatgaggaggtggattatagcaaaatggaccagggtaacaagaaggggcccttaggccgttgggactttgatacccaggaagaatacagcgagtatatgaacaacaaagaagctttgcccaaggctgcattccagtatggtatcaaaatgtctgaagggcggaaaaccaggcgcttcaaggaaaccaatgacaaagcagagcttgatcgccagtggaagaagattagygcaatcattgagaagaggaagaagatggaagctgatggggttgaagtcaaaagaccaaaatactaatcactagttacaaccagagatgctccacaaggatatgctccccackgwtttctttctacaatttccaaaggttgcaagatgtttttttgtggatgaatataaaattttattgtgtaattacttggttccattaaaattggttaacttgctattttcttkgttgagcatgtcccctccagtgcccttgaagcaccaagaacactaattccactggttgtgtaaaatcacatgcagaaagtcatcagtcctttcctgagctgtggttctagattcctagacagtaaggatgctctctagccagtgtgcccagtagagaagagaataatgatcctcactgatgggcaagaggtggatagaggaatgtaagtatgattggtctcaaatgtcagactcattccggcccatcttcaggcctagtccctggggaaagatttcctggggattgctgtcagcctgatgggctgctaatctgatctccaggctatgaaggactgggctctggatgaaggcatctaatgaaaatcacttatgggtg

SEQ ID NO: 27 - DNA, 2305 bp, Homo sapiens
aacgcaaagcagtgtgggttgattctgaggtgcactgtgggaaagagcttgtcgctgcggtgttgytgttggagactcgattgttggtgacagcgaaagaacgataacaaaatgccggagcgagatagtgagccgttctccaaccctttggcccccgatggccacgatgtggatgatcctcactccttccaccaatcaaaactcaccaatgaagacttcaggaaacttctcatgacccccagggctgcacctacctctgcaccaccttctaagtcacgtcaccatgagatgccaagggagtacaatgaggatgaagacccagctgcacgaaggaggaaaaagaaaagttattatgccaagctacgccaacaagaaattgagagagagagagagctagcagagaagtaccgggatcgtgccaaggaacggagagatggagtgaacaaagattatgaagaaaccgagcttatcagcaccacagctaactatagggctgttggccccactgctgaggcggacaaatcagctgcagagaagagaagacagttgatccaggagtccaaattcttgggtggtgacatggaacacacccatttggtgaaaggcttggattttgctctgcttcaaaaggtacgagctgagattgccagcaaagagaaagaggaagaggaactgatggaaaagccccagaaagaaaccaagaaagatgaggatcctgaaaataaaattgaatttaaaacacgtctgggccgcaatgtttaccgaatgctttttaagagcaaagcatatgagcggaatgagttgttcctgccgggccgcatggcctatgtggtagacctggatgatgagtatgctgacacagatatccccaccactcttatccgcagcaaggctgattgccccaccatggaggcccagaccacactgaccacaaatgacattgtcattagcaagctgacccagatcctttcatacctgaggcagggaacccgtaacaagaagcttaagaagaaggataaagggaagctggaagagaagaracctcctgaggctgacatgaatatttttgaagacaytggggattacgtaccctccacaaccaagacacctcgggacaaggagcgggagagatatcgggaacgggagcgtgatcgggaaagagacagagaccgtgaccgagagcgagagcgagaacgagatcgggaacgagagcgagagcgggaccgagagagagaagaggaaaagaagagacacagctactttgagaagccaaaagtagatgatgaggtgagytaggacctgggtctaccaaggagttgatcaagtccatcaatgaaaagtttgctgggtctgctggctgggaaggcacacatatgctgaagaagccagaagacaaaaagcagctgggagatttctttggcatgtccaacagttatgcagagtgctacccagccacgatggatgacatggctgtggatagtgatgaggaggtggattatagcaaaatggaccagggtaacaagaaggggcccttaggccgttgggactttgatacccaggaagaatacagcgagtatatgaacaacaaagaagctttgcccaaggctgcattccagtatggtatcaaaatgtctgaagggcggaaaaccaggcgcttcaaggaaaccaatgacaaagcagagcttgatcgccagtggaagaagattaatcattgagaagaggaagaagatggaagctgatggggttgaagtcaaaagaccaaaatactaatcactagttacaaccagagatgctccacaaggatatgctccccackgwtttctttctacaatttccaaaggttgcaagatgtttttttgtggatgaatataaaattttattgtgtaattacttggttccattaaaattggttaacttgctattttcttkgttgagcatgtcccctccagtgcccttgaagcaccaagaacactaattccactggttgtgtaaaatcacatgcagaaagtcatcagtcctttcctgagctgtggttctagattcctagacagtaaggatgctctctagccagtgtgcccagtagagaagagaataatgatcctcactgatgggcaagaggtggatagaggaatgtaagtatgattggtctcaaatgtcagactcattccggcccatcttcaggcctagtccctggggaaagatttcctggggattgctgtcagcctgatgggctgctaatctgatctccaggctatgaaggactgggctctggatgaaggcatctaatgaaaatcacttatgggtg

SEQ ID NO: 28 - DNA, 912 bp, Homo sapiens
atggaaagtgccctgccgagtatcttcactcttgtaataattgcagaattcataattgggaatttgagcaatggatttatagtactgatcaactgcattgactgggtcagtaaaagagagctgtcctcagtcgataaactcctcattatcttggcaatctccagaattgggctgatctgggaaatattagtaagttggtttttagctctgcattatctagccatatttgtgtctggaacaggattaagaattatgatttttagctggatagtttctaatcrcttcaatctctggcttgctacaatcttcagcatcttttatttgctcaaaatagcgagtttctctagccctgcttttctctatttgaagtggagagtaaacaaagtgattctgatgatactgctaggaaccttggtcttcttatttttaaatctgatacaaataaacatgcatataaaagactggctggaccgatatgaaagaaacacaacttggaatttcagtatgagtgactttgaaacattttcagtgtcggtcaaattcactatgactatgttcagtctaacaccatttactgtggccttcatctcttttctcctgttaattttctccctgcagaaacatctccagaaaatgcaactcaattacaaaggacacagagaccccaggaccaaggtccatacaaatgccttgaaaattgtgatctcattccttttattctatgctagtttctttctatgtgttctcatatcatggatttctgagctgtatcagarcacagtgatctacatgctttgtgagacgattggagtcttctctccttcaagccactcctttcttctgattctaggaaacgctaagttaagacaggcctttcttttggtggcagctaaggtatgggctaaacgatga

SEQ ID NO: 29 - DNA, 788 bp, Homo sapiens
atgaaggctgttctcagtaatcagactgtccacattccagaaaatgtcgacatcactctgaaggggcacagttcttgtgaaaggccctagaggaccctgcagagggacttcagtcacgtcagtatagaactcgggctccttggaaagaaaaagcagaggctccagattgacaaatgctgagaagatgggaattggctgccatgcgtgctatctgtagtcatgcacagaagatgatcaagggcgttatactgggcttctgtgacaagatgaggtctctgtgttctcacttccccatcaatgtcattatgcaggagaatagctctaytgtagaagtcagaactttcttgagcgaaaaatatatctgcagggttcgggtgagcccaggtgttgcttgttcaatatcccaagcccagaaagatgagttcrtccttaaaggaaatgacattgaacttgtttcaaattcagctgctttgactcagcaaaccacaacagctaaaaaccaggatatcagaacattttrgatggtatctatgtctctgaaaaagggacagttcagcaggctgatgagtaaaatctaagagttgtacagctacagaaacaagatgtcagataattcctaagacctatttgtgatattttaataatgyaataaaagacagctattgaaaaataaagtagtgatgaggtttcaagacatgaatgatgggatttgctgatggctagcactcaggatgtaagggaaagagaaggattgaggctaactattgagttttggtctaagaactgca

SEQ ID NO: 30 - DNA, 3756 bp, Homo sapiens
atgaactactgcaggaatccagatgctgtggcagctccttattgttatacgagggatcccggtgtcaggtgggagtactgcaacctgacgcaatgctcagacgcagaagggactgccgtcgcgcctccgactgttaccccggttccaagcctagaggctccttccgaacaagcaccaactgagcaaaggcctggggtgcaggagtgctaccacggaaatggacagagttatcaaggcacatacttcattactgtcacaggaagaacctgccaagcttggtcatctatgacaccacactcgcatagtcggaccccagcatactacccaaatgctggcttgatcaagaactactgccgaaatccagatcctgtggcagccccttggtgttatacaacagatcccagtgtcaggtgggagtactgcaacctgacacgatgctcagatgcagaatggactgccttcgtccctccgaatgttattctggctccaagcctagaggctttttttgaacaagcactgactgaggaaacccccggggtacaggactgctactaccattatggacagagttaccgaggcacatactccaccactgtcacaggaagaacttgccaagcttggtcatctatgacaccacaccagcatagtcggaccccagaaaactacccaaatgctggcctgascaggaactactgcaggaatccagatgctgagattcgcccttggtgttacaccatggatcccagtgtcaggtgggagtactgcaacctgacacaatgcctggtgacagaatcaagtgtccttgcaactctcacggtggtcccagayccaagcacagaggcttcttctgaagaagcaccaacggagcaaagccccggggtccaggattgctaccatggtgatggacagagttatcgaggctcattctctaccactgtcacaggaaggacatgtcagtcttggtyctctatgacaccacactggcatcagaggacaacagaatattatccaaatggtggcctgaccaggaactactgcaggaatccagatgctgagattagtccttggtgttataccatggatcccaatgtcagatgggagtactgcaacctgacacaatgtccagtgacagaatcaagtgtccttgcgacgtccacggctgtttctgaacaagcaccaacggagcaaagccccacagtccaggactgctaccatggtgatggacagagttatcgaggctcattctccaccactgttacaggaaggacatgtcagtcttggtcctctatgacmccacactggcatcagagaaccacagaatactacccaaatggtggcctgaccaggaactactgcaggaatccagatgctgagattcgcccttggtgttataccatggatcccagtgtcagatgggagtactgcaacctgacrcaatgtccagtgatggaatcaactstcctcacaactcccacggtggtcccagttccaagcacagagsttccttctgaagaagcaccaactgaaaacagcactggggtccaggactgctaccgaggtgatrgacagagttatcgaggcmcactctccaccactatcacaggaagaacatgtcagtcttggtcgtctatgacaccacattggcatcggaggatcccattatactatccaaatgrtggcctgaccaggaactactgcaggaatccagatgctgagattcgcccttggtgttacaccatggatcccagtgtcaggtgggagtactgcaacctgacacgatgtccagtgacagaatcgagtgtcctcacaactcccacagtggccccggttccaagcacagaggctccttctgaacaagcaccacctgagaaaagccctgtggtccaggattgctaccatggtgatggayggagttatcgaggcatatcctccaccactgtcacaggaaggacctgtcaatcttggtcatctatgataccacactggyatcagaggaccccagaaaactacccaaatgctggcctgaccgagaactactgcaggaatccagattctgggaaacaaccctggtgttacacaaccgatccgtgtgtgaggtgggagtactgcaatctgacacaatgctcagaaacagaatcaggtgtcctagagactcccactgttgttccagttccaagcayggaggctcattctgaagcagcaccaactgagcaaacccctgtggtccggcagtgctaccatggtaatggccagagttatcgaggcacattctccaccactgtcacaggaaggacatgtcaatcttggtcatccatgacaccacaccggcatcagaggaccccagaaaactacccaaatgatggcctgacaatgaactactgcaggaatccagatgccgatacaggcccttggtgttttaccayggaccccagcatcaggtgggagtactgcaacctgacgcgatgctcagacacagaagggactgtggtcgctcctccgactgtcatccaggttccaagcctagggcctccttctgaacaagaytgtatgtttgggaatgggaaaggataccggggcaagaargcaaccactgttactgggacgccatgccaggaatgggctkcccaggagccccatagacacagcacrttcattccagggacaaataaatgggcaggtctggaaaaaaattactgccgtaaccctgatggtgacatcaatggtccctggtgctacacaatgaatccaagaaaactttttgactactgtgatatccctctctgtgcatcctcttcatttgattgtgggaagcctcaagtggagccgaagaaatgtcctggaagcattgtagsggkgtgtgtggcccacccacattcctggccctggcaagtcagtctcagaacaaggtttggaaagcacttctgtggaggcaccttaatatccccagagtgggtgctgactgctgctcactgcttgaagaagtcctcaaggccttcatcctacaaggtcatcctgggtgcacaccaagaagtgaacctcgaatctcatgttcaggaaatrgaagtgtctaggctgttcttggagcccacacaagcagatattgccttgctaaagctaagcaggcctgccgtcatcactgacaaagtaatgccagcttgtctgccatccccagactacatggtcaccgccaggactgaatgttacatcactggctggggagaaacccaaggtacctttgggactggccttctcaaggaagcccagctccttgttattgagaatgaagtgtgcaatcactataagtatatttgtgctgagcatttggccagaggcactgacagttgccagggtgacagtggagggcctctggtttgcttcgagaaggacaaatacattttacaaggagtcacttcttggggtcttggctgtgcaygccccaataagcctggtgtctatgctcgtgtttcaaggtttgttacttggattgagggaatgatgagaaataattaattggacgggagacagagtgaagcatcaacctacttagaagctgaaacgtgggtaaggatttagcatgctggaaataatagacagcaatcaaacgaagacactgttcccagctaccagctatgccaaaccttggcatttttggtatttttgtgtataagcttttaaggtctgactgacaaattctgtattaaggtgtcatagctatgacatttgttaaaaataaactctgcacttattttgatttga

SEQ ID NO: 31 - DNA, 3305 bp, Homo sapiens
ttctgtggcaagaataaactttgggtcttggattgcaataccacctgtggagaaaatggtatgcgagggaaagcgatcagcctsttgcccttgtttcttcctcttgaccgccaagtkctactggatcctcacaatgatgcaaagaactcacagccaggagtatgcccattccatacgggtggatggggacattattttggggggtctcttccctgtccacgcaaagggagagagaggggtgccttgtggggagctgaagaaggaaaaggggattcacagactggaggccatgctttatgcaattgaccagattaacaaggaccctgatctcctttccaacatcactctgggtgtccgcatcctcgacacgtgctctagggacacctatgctttggagcagtctctaacattygtgcaggcattaatagagaaagatgcttcggatgtgaagtgtgctaatggagatccacccattttcaccaagcccgacaagatttctggcgtcataggtgctgcagcaagctccrtgtccatcatggttgctaacattttaagactttttaagatacctcaaatcagctatgcatccacagccccagagctaagtgataacaccaggtatgactttttctctcgagtggttccgcctgactcctaccaagcccaagccatggtggacatcgtgacagcactgggatggaattatgtttcgacactggcttctgaggggaactatggtgagagcggygtggaggccttcacccagatctcgagggagattggtggtgtttgcattgctcagtcacagaaaatcccacgtgaaccaagacctggagaatttgaaaaaattatcaaacgcctgctagaaacacctaatgctcgagcagtgattatgtttgccaatgaggatgacatcaggaggatattggaagcagcaaaaaaactaaaccaaagtggscattttctctggattggctcagatagttggggatccaaaatagcacctgtctatcagcaagaggagattgcagaaggggctgtgacaattttgcccaaacgagcatcaattgatggatttgatcgatactttagaagccgaactcttgccaataatcgaagaaatgtgtggtttgcagaattctgggaggagaattttggctgcaagttaggatcacatgggaaaaggaacagtcatataaagaaatgcacagggctggagcgaattgctcrggattcatcttatgaacaggaaggaaaggtccaatttgtaattgatgctgtatattccatggcttacgccctgcacaatatgcacaaagatctctgccctggatacattggcctttgtccacgaatgagtaccattgatgggaaagagctacttggttatattcgggctgtaaattttaatggcagtgctggcactcctgtcacttttaatgaaaacggagatgctcctggacgttatgatatcttccagtatcaaataaccaacaaaagcacagagtacaaagtcatyggccactggaccaatcagcttcatctaaaagtggaagacatgcagtgggctcatagagaacatactcacscggcgtctgtctgcagcctgcygtgtaagccaggggagaggaagaaaacggtgaaaggggtcccttgctgctggcactgtgaacgctgtgaaggttacaactaccaggkggatgagctgtcctgtgaactttgccctctggatcagmgacccaacatgaaccgcacaggctgccagcttatccccatcatcaaattggagtggcattctccctgggctgtggtgcctgtgtttgttgcaatattgggaatcatcgccaccacctttgtgatcgtgacctttgtccgctataatgacacacctatcgtgagggcttcaggacgcgaacttagttacgtgctcctaacggggatttttctctgttattcaatcacgtttttaatgattgcagcaccagatacaatcatatgctccttccgacgggtcttcctaggacttggcatgtgtttcagctatgcagcccttctgaccaaaacaaaccgtatccaccgaatatttgagcaggggaagaaatctgtcacagcgcccaagttcattagtccagcatctcagctggtgatcaccttcagcctcatctccgtccagctccttggagtgtttgtctggtttgttgtggatcccccscacatcatcattgactatggagagcagcggacactagatccagagaaggccaggggagtgctcaagtgtgacatttctgatctctcactcatttgttcacttggatacagtatcctcttgatggtcacttgtactgtttatgccawtaaaacgagaggtgtcccagagactttcaatgaagccaaacctattggatttaccatgtataccacctgcatcatttggttagctttcatccccatcttttttggtacagcccagtcagcagaaaagatgtacatccagacaacaacacttactgtytccatgagtttaagtgcttcagtatctctgggcatgctctatatgcccaaggtttatattataatttttcatccagaacagaatgttcaaaaacgcaagaggagcttcaaggctgtggtgacagctgccaccatgcaaagcaaactgatccaaaaaggaaatgacagaccaaatggcgaggtgaaaagtgaactctgtgagagtcttgaaaccaacacttcctctaccaagacaacatatatcakttacagcaatcattcaatctgaaacagggaaatggcacaatctgaagagaygtggtatatgatcttaaatgatgaacatgagaccgcaaaaattcactcctggagatctccgtagactacaatcaatcaaatcaatagtcagtcttgtaaggaacaaaaattagccatgagccaaaagtatcaataaacggggagtgaagaaacccgttttatacaataaaaccaatgagtgtcaagctaaagtattgcttattcatgagcagttaaaacaaatcacaaaaggaaaactaatgttagctcgtgaaaaaaaatgctgttgaaataaataatgtctgatgttattcttgtatttttctgtgattgtgagaactcccgttcctgtcccacattgtttaacttgtataagacaatgagtctgtttcttgtaatggctgaccagattgaagccctgggttgtgctaaaaataaatgcaatgattgatgcatgcaattttttatacaaataatttatttctaataataaaggaatgttttgcaaatgttga

SEQ ID NO: 32 - DNA, 3299 bp, Homo sapiens
ttctgtggcaagaataaactttgggtcttggattgcaataccacctgtggagaaaatggtatgcgagggaaagcgatcagcctsttgcccttgtttcttcctcttgaccgccaagtkctactggatcctcacaatgatgcaaagaactcacagccaggagtatgcccattccatacgggtggatggggacattattttggggggtctcttccctgtccacgcaaagggagagagaggggtgccttgtggggagctgaagaaggaaaaggggattcacagactggaggccatgctttatgcaattgaccagattaacaaggaccctgatctcctttccaacatcactctgggtgtccgcatcctcgacacgtgctctagggacacctatgctttggagcagtctctaacattygtgcaggcattaatagagaaagatgcttcggatgtgaagtgtgctaatggagatccacccattttcaccaagcccgacaagatttctggcgtcataggtgctgcagcaagctccrtgtccatcatggttgctaacattttaagactttttaagatacctcaaatcagctatgcatccacagccccagagctaagtgataacaccaggtatgactttttctctcgagtggttccgcctgactcctaccaagcccaagccatggtggacatcgtgacagcactgggatggaattatgtttcgacactggcttctgaggggaactatggtgagagcggygtggaggccttcacccagatctcgagggagattggtggtgtttgcattgctcagtcacagaaaatcccacgtgaaccaagacctggagaatttgaaaaaattatcaaacgcctgctagaaacacctaatgctcgagcagtgattatgtttgccaatgaggatgacatcaggaggatattggaagcagcaaaaaaactaaaccaaagtggscattttctctggattggctcagatagttggggatccaaaatagcacctgtctatcagcaagaggagattgcagaaggggctgtgacaattttgcccaaacgagcatcaattgatggatttgatcgatactttagaagccgaactcttgccaataatcgaagaaatgtgtggtttgcagaattctgggaggagaattttggctgcaagttaggatcacatgggaaaaggaacagtcatataaagaaatgcacagggctggagcgaattgctcrggattcatcttatgaacaggaaggaaaggtccaatttgtaattgatgctgtatattccatggcttacgccctgcacaatatgcacaaagatctctgccctggatacattggcctttgtccacgaatgagtaccattgatgggaaagagctacttggttatattcgggctgtaaattttaatggcagtgctggcactcctgtcacttttaatgaaaacggagatgctcctggacgttatgatatcttccagtatcaaataaccaacaaaagcacagagtacaaagtcatyggccactggaccaatcagcttcatgtggaagacatgcagtgggctcatagagaacatactcacscggcgtctgtctgcagcctgcygtgtaagccaggggagaggaagaaaacggtgaaaggggtcccttgctgctggcactgtgaacgctgtgaaggttacaactaccaggkggatgagctgtcctgtgaactttgccctctggatcagmgacccaacatgaaccgcacaggctgccagcttatccccatcatcaaattggagtggcattctccctgggctgtggtgcctgtgtttgttgcaatattgggaatcatcgccaccacctttgtgatcgtgacctttgtccgctataatgacacacctatcgtgagggcttcaggacgcgaacttagttacgtgctcctaacggggatttttctctgttattcaatcacgtttttaatgattgcagcaccagatacaatcatatgctccttccgacgggtcttcctaggacttggcatgtgtttcagctatgcagcccttctgaccaaaacaaaccgtatccaccgaatatttgagcaggggaagaaatctgtcacagcgcccaagttcattagtccagcatctcagctggtgatcaccttcagcctcatctccgtccagctccttggagtgtttgtctggtttgttgtggatcccccscacatcatcattgactatggagagcagcggacactagatccagagaaggccaggggagtgctcaagtgtgacatttctgatctctcactcatttgttcacttggatacagtatcctcttgatggtcacttgtactgtttatgccawtaaaacgagaggtgtcccagagactttcaatgaagccaaacctattggatttaccatgtataccacctgcatcatttggttagctttcatccccatcttttttggtacagcccagtcagcagaaaagatgtacatccagacaacaacacttactgtytccatgagtttaagtgcttcagtatctctgggcatgctctatatgcccaaggtttatattataatttttcatccagaacagaatgttcaaaaacgcaagaggagcttcaaggctgtggtgacagctgccaccatgcaaagcaaactgatccaaaaaggaaatgacagaccaaatggcgaggtgaaaagtgaactctgtgagagtcttgaaaccaacacttcctctaccaagacaacatatatcakttacagcaatcattcaatctgaaacagggaaatggcacaatctgaagagaygtggtatatgatcttaaatgatgaacatgagaccgcaaaaattcactcctggagatctccgtagactacaatcaatcaaatcaatagtcagtcttgtaaggaacaaaaattagccatgagccaaaagtatcaataaacggggagtgaagaaacccgttttatacaataaaaccaatgagtgtcaagctaaagtattgcttattcatgagcagttaaaacaaatcacaaaaggaaaactaatgttagctcgtgaaaaaaaatgctgttgaaataaataatgtctgatgttattcttgtatttttctgtgattgtgagaactcccgttcctgtcccacattgtttaacttgtataagacaatgagtctgtttcttgtaatggctgaccagattgaagccctgggttgtgctaaaaataaatgcaatgattgatgcatgcaattttttatacaaataatttatttctaataataaaggaatgttttgcaaatgttga

SEQ ID NO: 33 - DNA, 601 bp, Homo sapiens
tgctgttcagcatcctgaacrttctggctctgtcttgggtggcggcagccgcggacagattggaaaaacgatgytawctcgccgcggccgcgacaagagctagcctccagtacggacgacgcctcactcgccgcggcgcaggcggtgcccgccgggataggaggtgcatttggaccagatgacacccaatgtcccattcaacggtcgcattctgtcatccacaggaattagtcctgtatccgaaacattctctggtagtcaaaagcttayaagcacaagatgtgaaggaggccacacttaaaaaaaaacttgaaatggagtttcatttggaaggacactgactaaggaaaaacagagaaaaggatgaaacccaagccaactctgcaactctattaaaaacaccaagacttcaatataatctccttaaagggaggcagtgcattcttcatggctagagcttcagcagctatctagaaccatatggtggaagccacttactgagaactgtgaaacaagagcctgggtccctgacatatgaagccaccatacctaccttmaagtgtctttcacttgagggaaaaatacatctttcttaggtaag

SEQ ID NO: 34 - DNA, 6988 bp, Homo sapiens
ctgtwacaagctttcaagcattcaaaggtctaaatgaaaaaggctaagtattatttcaaaaggcaagtatatcctaatatagcaaaacaaacaaagcaaaatccawcagctactcctccaattgaagtgatgaagcccaaataattcatatagcaaaatggagaaaattagaccggccatctaaaaatctgccattggtgaagtgatgaagaacatttactgtcttattccgaagcttgtcaattttgcaactcttggctgcctatggatttctgtggtgcagtgtacagttttaaatagctgcctaaagtcgtgtgtaactaatctgggccagcagcttgaccttggcacaccacataatctgagtgaaccgtgtatccaaggatgtcacttttggaactctgtagatcagaaaaactgtgctttaaagtgtcgggagtcgtgtgaggttggctgtagcagcgcggaaggtgcatatgaagaggaagtactggaaaatgcagacctwccaactgctccctttgcttcttccattggaagccacaatatgacattacgatggaaatctgcaaacttctctggagtaaaatacatcattcagtggaaatatgcacaacttctgggaagctggacttatmctaagactgtgtccagaccgtcctatgtggtcaagcccctgcaccccttcactgagtacattttccragtggtttggatcttcacagcgcagctgcagctctactcccctccaagtcccagttacaggactcatcctcatggagttcctgaaactgcacctttgattaggaatattgagagctcaagtcccgacactgtggaagtyagctgggatccacctcaattcccaggtggacctattttgggttataacttaaggctgatcagcaaaaatcaaaaattagatgcagggacacagagaaccagtttccagttttactccactttaccaaatactatctacaggttttctattgcagcagtaaatgaagttggtgagggtccagaagcagaatctagtattaccacttcatcttcagcagttcaacaagaggaacagtggctctttttatccagaaaaacttctctaagaaagagatctttaaaacatttagtagatgaagcacattgccttcggttggatgctatataccataatattacaggaatatctgttgatgtccaccagcaaattgtttatttctctgaaggaactctcatatgggcgaagaaggctgccaacatgtctgatgtatctgacctgagaattttttacagagsttcaggattaatttcttctatctccatagattggctttatcaaagaatgtatttcatcatggatgaactggtatgtgtctgtgatttagagaactgctcaaacatcgaggaaattactccaccctctattagtgcacctcaaaaaattgtggctgattcatacaatgggtatgtcttttacctcctgagagatggcatttatagagcagaccttcctgtaccatctggccggtgtgcagaagctgtgcgtattgtggagagttgcacgttaaaggactttgcaatcragccacaagccaagcgaatcatttacttcaatgacactgcccaagtcttcatgtcaacatttctggatggctctgcttcccatctcatcctacctcgcatcccctttgctgatgtgaaaagttttgcttgtgaaaacaatgactttcttgtcacagatggcaaggtcattttccaacaggatgctttgtcttttaatgaattcatcgtgggatgtgacctgagtcacatrgaagaatttgggtttggtaacttggtcatctttggctcatcctcccagctgcaccctctgccaggccgcccgcaggagctttcggtgctgtttggctctcaccaggctcttgttcaatggaagcctcctgcccttgccataggagccaatgtcatcctgatcagtgatattattgaactctttgaattaggcccttctgcctggcagaactggacctatgaggtgaaagtatccacccaagaccctcctgaagtcactcatattttcttgaacataagtggaaccatgctgaatgtacctgagctgcagagtgctatgaaatacaaggtttctgtgagagcaagttytccaaagaggccaggcccctggtcagarccctcagtgggtactaccctggtgccagctagtgaaccaccatttatcatggctgtgaaagaagatgggctttggagtaaaccattaaatagctttggcccaggagagttcttatcctctgatataggaaatgtgtcagacatggattggtataacaacagcctctactacagtgacacgaaaggcgacgtttttgtgtggctgctgaatgggacggatatctcagagaattatcacctacccagcattgcaggagcaggggctttagcttttgagtggctgggtcactttctctactgggctggaaagacatatgtgatacaaaggcagtctgtgttgacgggacacacagacattgttacccacgtgaagctattggtgartgacatggtggtggattcagttggtggatatctctactggaccacactctattcagtggaaagcaccagactaaatggggaaagttcccttgtactacagacacagccttggttttctgggaaaaaggtaattgctctaactttagacctcagtgatgggctcctgtatyggttggttcaagacagtcaatgtattcacctgtacacagctgttcttcggggacagagcactggggataccaccatcacagaatttgcagcctggagtacttctgaaatttcccagaatgcactgatgtactatagtggtcggctgttctggatcaatggctttaggattatcacaactcaagaaataggtcagaaaaccagtgtctctgttttggaaccagccagatttaatcagttcacaattattcagacatcccttaagcccctgccagggaacttttcctttacccctaaggttattccagattctgttcaagagtcttcatttaggattgarggaaatgcttcaagttttcaaatcctgtggaatggtccccctgcggtagactggggtgtagttttctacagtgtagaatttagtgctcattctaagttcttggctagtgaacaacactctttacctgtatttactgtggaaggactggaaccttatgccttatttaatctttctgtcactccttatacctactggggaaagggccccaaaacatctctgtcacttcgagcacctgaaacagttccatcagcaccagagaaccccagaatatttatattaccaagtggaaaatgctgcaacaagaatgaagttgtggtggaatttaggtggaacaaacctaagcatgaaaatgrggtgttaacaaaatttgaaattttctacaatatatccaatcaaagtattacaaacaaaacatgtgaagactggattgctgtcaatgtcactccctyagtgatgtcttttcaacttgaaggcatgagtcccagatgctttattgccttccaggttagggcctttacatctaaggggccaggaccatatgctgacgttgtaaagtctacaacatcagaaatcaacccatttcctcacctcataactcttcttggtaacaagatagtttttttagatatggatcaaaatcaagttgtgtggacrttttcagcagaaagagttatcagtgccgtttgctacacagctgataatgagatgggatattatgctgaaggggactcactctttcttctgcactwgcacaatcgctctagctctgagcttttccaagattcactggtttttgatatcacagttattacaattgactggatttcaaggcacctctactttgcactgaaagaatcacaaaatggaatgcaagtatttgatgttgatcttgaacacaaggtgaaatatcccagagaggtgaagattcacaataggaattcaacaataatttctttttctgtatatcctcttttaagtcgcttgtattggacagaagtttccaattttggctaccagatgttctactacagtattatcagtcacaccttgcaccgaattctgcaacccacagctacaaaccaacaaaacaaaaggaatcaatgttcttgtaatgtgactgaatttgagttaagtggagcaatggctattgatacctctaacctagagaaaccattgatatactttgccaaagcacaagagatctgggcaatggatctggaaggctgtcagtgttggagagttatcacagtacctgctatgctcgcaggaaaaacccttgttagcttaactgtggatggagatcttatatactggatcatcacagcaaaggacagcacacagatttatcaggcaaagaaaggaaatggggccatcgtttcccaggtgaaggccctaaggagtaggcatatcttggcttacagttcagttatgcagccttttccagataaagcgtttctgtctctagcttcagacactgtggaaccaactatacttaatgccactaacactagcctcacaatcagattacctctggccaagacaaacctcacatggtatggcatcaccagccctactccaacatacctggtttattatgcagaagttaatgacaggaaaaacagctctgacttgaaatatrgaattctggaatttcaggacagtatagctcttattgaagatttacaaccattttcaacatacatgatacagatagctgtaaaaaattattattcagatcctttggaacatttaccaccaggaaaagagatttggggaaaaactaaaaatggagtaccagaggcagtgcagctcattaatacaactgtgcggtcagacaccagcctcattatatcttggagagaatctcacaagccaaatggacctaaagaatcagtccgttatcagytggcaatctcacacctggccctaattcctgaaactcctctaagacaaagtgaatttccaaatggaaggctcactctccttgttactagactgtctggtggaaatatttatgtgttaaaggttcttgcctgccactctgaggaaatgtggtgtacagagagtcatcctgtcactgtggaaatgtttaacacaccagagaaaccttattccttggttccagagaacactagtttgcaatttaattggaaggctccattgaatgttaacctcatcagattttgggttgagctacagaagtggaaatacaatgagttttaccatgttaaaacttcatgcagccaaggtcctgcttatgtctgtaatatcacaaatctacaaccttatacttcatataatgtcagagtagtggtggtttataagacgggagaaaatagcacctcacttccagaaagctttaagacaaaagctggagtcccaaataaaccaggcattcccaaattactagaagggagtaaaaattcaatacagtgggagaaagctgaasataatggatgtagaattacatactatatccttgagataagaaagagcacttcaaataatttacagaaccagaatttaaggtggaagatgacatttaatggatcctgcagtagtgtttgcacatggaagtccaaaaacctgaaaggaatatttcagttcagagtagtagctgcaaataatctagggtttggtgaatatagtggaatcagtgagaatattatattagttggagatgatttttggataccagaaacaagtttcatacttactattatagttggaatatttctggttgttacaatcccactgacctttgtctggcatagaagattaaagaatcaaaaaagtgccaaggaaggggtgacagtgcttataaacraagacaaagagttggctgagctgcgaggtctggcagccggagtaggcctggctaatgcctgctatgcaatacatactcttccaacccaagaggagattgaaaatcttcctgccttccctcgggaaaaactgactctgcgtctcttgctgggaagtggagcctttggagaagtgtatgaaggaacagcagtggacatcttaggagttggaagtggagaaatcaaagtagcagtgaagactttgaagaagggttccacagaccaggagaagattgaattcctgaaggaggcacatctgatgagcaaatttaatcatcccaacattctgaagcagcttggagtttgtctgctgaatgaaccccaatacattatcctggaactgatggagggaggagaccttcttacttatttgcrtaaagcccggatggcaacgttttatggtcctttactcaccttggttgaccttgtagacctgtgtgtagatatttcaaaaggctgtgtctacttggaacggatgcatttcattcacagggatctggcagctmgaaattgccttgtttccgtgaaagactataccagtccacggatagtgaagattggagactttggactcgccagagacatctataaaaatgattactatagaaagagaggggaaggcctgctcccagttcggtggatggctccagaaagtttgatggatggaatcttcactactcaatctgatgtatggtcttttggaattctgatttgggagattttaactcttggtcatcagccttatccagctcattccaaccttgatgtgttaaactatgtgcaaacaggagggagactggagccaccaagaaattgtcctgatgatctgtggaatttaatgacccagtgctgggctcaagaacccgaccaaagacctacttttcatagaattcagraccaacttcagttattcagaaattttttcttaaatagcatttatmagtscagagatgaagcaaacaacagtggagtcataaakgaaagctttgaaggtaagtttgattcttcagaattttcyagttttcgctgcactgtgaactga

SEQ ID NO: 35 - DNA, 7443 bp, Homo sapiens
ctgtwacaagctttcaagcattcaaaggtctaaatgaaaaaggctaagtattatttcaaaaggcaagtatatcctaatatagcaaaacaaacaaagcaaaatccawcagctactcctccaattgaagtgatgaagcccaaataattcatatagcaaaatggagaaaattagaccggccatctaaaaatctgccattggtgaagtgatgaagaacatttactgtcttattccgaagcttgtcaattttgcaactcttggctgcctatggatttctgtggtgcagtgtacagttttaaatagctgcctaaagtcgtgtgtaactaatctgggccagcagcttgaccttggcacaccacataatctgagtgaaccgtgtatccaaggatgtcacttttggaactctgtagatcagaaaaactgtgctttaaagtgtcgggagtcgtgtgaggttggctgtagcagcgcggaaggtgcatatgaagaggaagtactggaaaatgcagacctwccaactgctccctttgcttcttccattggaagccacaatatgacattacgatggaaatctgcaaacttctctggagtaaaatacatcattcagtggaaatatgcacaacttctgggaagctggacttatmctaagactgtgtccagaccgtcctatgtggtcaagcccctgcaccccttcactgagtacattttccragtggtttggatcttcacagcgcagctgcagctctactcccctccaagtcccagttacaggactcatcctcatggagttcctgaaactgcacctttgattaggaatattgagagctcaagtcccgacactgtggaagtyagctgggatccacctcaattcccaggtggacctattttgggttataacttaaggctgatcagcaaaaatcaaaaattagatgcagggacacagagaaccagtttccagttttactccactttaccaaatactatctacaggttttctattgcagcagtaaatgaagttggtgagggtccagaagcagaatctagtattaccacttcatcttcagcagttcaacaagaggaacagtggctctttttatccagaaaaacttctctaagaaagagatctttaaaacatttagtagatgaagcacattgccttcggttggatgctatataccataatattacaggaatatctgttgatgtccaccagcaaattgtttatttctctgaaggaactctcatatgggcgaagaaggctgccaacatgtctgatgtatctgacctgagaattttttacagagsttcaggattaatttcttctatctccatagattggctttatcaaagaatgtatttcatcatggatgaactggtatgtgtctgtgatttagagaactgctcaaacatcgaggaaattactccaccctctattagtgcacctcaaaaaattgtggctgattcatacaatgggtatgtcttttacctcctgagagatggcatttatagagcagaccttcctgtaccatctggccggtgtgcagaagctgtgcgtattgtggagagttgcacgttaaaggactttgcaatcragccacaagccaagcgaatcatttacttcaatgacactgcccaagtcttcatgtcaacatttctggatggctctgcttcccatctcatcctacctcgcatcccctttgctgatgtgaaaagttttgcttgtgaaaacaatgactttcttgtcacagatggcaaggtcattttccaacaggatgctttgtcttttaatgaattcatcgtgggatgtgacctgagtcacatrgaagaatttgggtttggtaacttggtcatctttggctcatcctcccagctgcaccctctgccaggccgcccgcaggagctttcggtgctgtttggctctcaccaggctcttgttcaatggaagcctcctgcccttgccataggagccaatgtcatcctgatcagtgatattattgaactctttgaattaggcccttctgcctggcagaactggacctatgaggtgaaagtatccacccaagaccctcctgaagtcactcatattttcttgaacataagtggaaccatgctgaatgtacctgagctgcagagtgctatgaaatacaaggtttctgtgagagcaagttytccaaagaggccaggcccctggtcagarccctcagtgggtactaccctggtgccagctagtgaaccaccatttatcatggctgtgaaagaagatgggctttggagtaaaccattaaatagctttggcccaggagagttcttatcctctgatataggaaatgtgtcagacatggattggtataacaacagcctctactacagtgacacgaaaggcgacgtttttgtgtggctgctgaatgggacggatatctcagagaattatcacctacccagcattgcaggagcaggggctttagcttttgagtggctgggtcactttctctactgggctggaaagacatatgtgatacaaaggcagtctgtgttgacgggacacacagacattgttacccacgtgaagctattggtgartgacatggtggtggattcagttggtggatatctctactggaccacactctattcagtggaaagcaccagactaaatggggaaagttcccttgtactacagacacagccttggttttctgggaaaaaggtaattgctctaactttagacctcagtgatgggctcctgtatyggttggttcaagacagtcaatgtattcacctgtacacagctgttcttcggggacagagcactggggataccaccatcacagaatttgcagcctggagtacttctgaaatttcccagaatgcactgatgtactatagtggtcggctgttctggatcaatggctttaggattatcacaactcaagaaataggtcagaaaaccagtgtctctgttttggaaccagccagatttaatcagttcacaattattcagacatcccttaagcccctgccagggaacttttcctttacccctaaggttattccagattctgttcaagagtcttcatttaggattgarggaaatgcttcaagttttcaaatcctgtggaatggtccccctgcggtagactggggtgtagttttctacagtgtagaatttagtgctcattctaagttcttggctagtgaacaacactctttacctgtatttactgtggaaggactggaaccttatgccttatttaatctttctgtcactccttatacctactggggaaagggccccaaaacatctctgtcacttcgagcacctgaaacagttccatcagcaccagagaaccccagaatatttatattaccaagtggaaaatgctgcaacaagaatgaagttgtggtggaatttaggtggaacaaacctaagcatgaaaatgrggtgttaacaaaatttgaaattttctacaatatatccaatcaaagtattacaaacaaaacatgtgaagactggattgctgtcaatgtcactccctyagtgatgtcttttcaacttgaaggcatgagtcccagatgctttattgccttccaggttagggcctttacatctaaggggccaggaccatatgctgacgttgtaaagtctacaacatcagaaatcaacccatttcctcacctcataactcttcttggtaacaagatagtttttttagatatggatcaaaatcaagttgtgtggacrttttcagcagaaagagttatcagtgccgtttgctacacagctgataatgagatgggatattatgctgaaggggactcactctttcttctgcactwgcacaatcgctctagctctgagcttttccaagattcactggtttttgatatcacagttattacaattgactggatttcaaggcacctctactttgcactgaaagaatcacaaaatggaatgcaagtatttgatgttgatcttgaacacaaggtgaaatatcccagagaggtgaagattcacaataggaattcaacaataatttctttttctgtatatcctcttttaagtcgcttgtattggacagaagtttccaattttggctaccagatgttctactacagtattatcagtcacaccttgcaccgaattctgcaacccacagctacaaaccaacaaaacaaaaggaatcaatgttcttgtaatgtgactgaatttgagttaagtggagcaatggctattgatacctctaacctagagaaaccattgatatactttgccaaagcacaagagatctgggcaatggatctggaaggctgtcagtgttggagagttatcacagtacctgctatgctcgcaggaaaaacccttgttagcttaactgtggatggagatcttatatactggatcatcacagcaaaggacagcacacagatttatcaggcaaagaaaggaaatggggccatcgtttcccaggtgaaggccctaaggagtaggcatatcttggcttacagttcagttatgcagccttttccagataaagcgtttctgtctctagcttcagacactgtggaaccaactatacttaatgccactaacactagcctcacaatcagattacctctggccaagacaaacctcacatggtatggcatcaccagccctactccaacatacctggtttattatgcagaagttaatgacaggaaaaacagctctgacttgaaatatrgaattctggaatttcaggacagtatagctcttattgaagatttacaaccattttcaacatacatgatacagatagctgtaaaaaattattattcagatcctttggaacatttaccaccaggaaaagagatttggggaaaaactaaaaatggagtaccagaggcagtgcagctcattaatacaactgtgcggtcagacaccagcctcattatatcttggagagaatctcacaagccaaatggacctaaagaatcagtccgttatcagytggcaatctcacacctggccctaattcctgaaactcctctaagacaaagtgaatttccaaatggaaggctcactctccttgttactagactgtctggtggaaatatttatgtgttaaaggttcttgcctgccactctgaggaaatgtggtgtacagagagtcatcctgtcactgtggaaatgtttaacacaccagagaaaccttattccttggttccagagaacactagtttgcaatttaattggaaggctccattgaatgttaacctcatcagattttgggttgagctacagaagtggaaatacaatgagttttaccatgttaaaacttcatgcagccaaggtcctgcttatgtctgtaatatcacaaatctacaaccttatacttcatataatgtcagagtagtggtggtttataagacgggagaaaatagcacctcacttccagaaagctttaagacaaaagctggagtcccaaataaaccaggcattcccaaattactagaagggagtaaaaattcaatacagtgggagaaagctgaasataatggatgtagaattacatactatatccttgagataagaaagagcacttcaaataatttacagaaccagaatttaaggtggaagatgacatttaatggatcctgcagtagtgtttgcacatggaagtccaaaaacctgaaaggaatatttcagttcagagtagtagctgcaaataatctagggtttggtgaatatagtggaatcagtgagaatattatattagttggagatgatttttggataccagaaacaagtttcatacttactattatagttggaatatttctggttgttacaatcccactgacctttgtctggcatagaagattaaagaatcaaaaaagtgccaaggaaggggtgacagtgcttataaacraagacaaagagttggctgagctgcgaggtctggcagccggagtaggcctggctaatgcctgctatgcaatacatactcttccaacccaagaggagattgaaaatcttcctgccttccctcgggaaaaactgactctgcgtctcttgctgggaagtggagcctttggagaagtgtatgaaggaacagcagtggacatcttaggagttggaagtggagaaatcaaagtagcagtgaagactttgaagaagggttccacagaccaggagaagattgaattcctgaaggaggcacatctgatgagcaaatttaatcatcccaacattctgaagcagcttggagtttgtctgctgaatgaaccccaatacattatcctggaactgatggagggaggagaccttcttacttatttgcrtaaagcccggatggcaacgttttatggtcctttactcaccttggttgaccttgtagacctgtgtgtagatatttcaaaaggctgtgtctacttggaacggatgcatttcattcacagggatctggcagctmgaaattgccttgtttccgtgaaagactataccagtccacggatagtgaagattggagactttggactcgccagagacatctataaaaatgattactatagaaagagaggggaaggcctgctcccagttcggtggatggctccagaaagtttgatggatggaatcttcactactcaatctgatgtatggtcttttggaattctgatttgggagattttaactcttggtcatcagccttatccagctcattccaaccttgatgtgttaaactatgtgcaaacaggagggagactggagccaccaagaaattgtcctgatgatctgtggaatttaatgacccagtgctgggctcaagaacccgaccaaagacctacttttcatagaattcagraccaacttcagttattcagaaattttttcttaaatagcatttatmagtscagagatgaagcaaacaacagtggagtcataaakgaaagctttgaaggtgaagatggcgatgtgatttgtttgaattcagatgacattatgccagttgctttaatggaaacgaagaaccgagaagggttaaactatatggtacttgctacagaatgtggccaaggtgaagaaaagtctgagggtcctctaggctcccaggaatctgaatcttgtggtctgaggaaagaagagaaggaaccacatgcagacaaagatttctgccaagaaaaacaagtggcttactgcccttctggcargcctgaaggcctgaactatgcctgtctcactcacagtggatatggagatgggtctgattaatagcgttgtttgggaaatagagagttgagataaacactctcattcagtagttactgaaagaaaactctgctagaatgataaatgtcatggtggtctataactccaaataaacaatgcaacgttcctgatttctaatcttggttctgagagccatttggtttcagttgtagcaatccccataccagctgcctgac

SEQ ID NO: 36 - DNA, 1643 bp, Homo sapiens
gtaaggaactgtagcttctctctgaaactgccgggaaagggaaaatctttttaaaatagacatcacacaaccaacagggtcccctaggttcaggcggggaggtgaggtcgagtgagaggaactgcttagcatacgcggggatgctcctcccatctcaccccaccgcgctaaggagaaggtcactttctctttaaatgcaaatgaactccctccagcttagctttcacccggtggtgttcccgggaggagagggcggagggcggagggaacttgcaccgaagcatcactcgagaccccaaacctccaggcctgaggcccagccagcgcccaatggatgacaaaaagaagaaacggagtcccaagccctgcctggcccagccagcccaggccccaggcacactayggagggtccctgtgcctaccagccacagcggctccttggccctaggacttcctcatctgccatcccccaagcagcgggccaagttcaagagagtaggcaaagagaagtgccgcccagtcctggctggaggtggaagcggctctgcaggcacgcccctgcagcactccttcctgaccgaggtgactgatgtctatgagatggaggggggactcctgaacctgctcaatgatttccactctggccggctgcaggccttcgggaaggaatgctcctttgagcagctggagcacgttcgggagatgcaggagaagctagcccggctgcacttcagcctggatgtgtgtggggaggaggaggacgatgaagaggaagaggatggggtcactgarrggctgccagaggagcagaagaagacaatggctgaccgtaacctggaccagctgcttagcaatctggaagacctcagtaattctatgtatcctttccaaggaacccgtctatgtgtgtgtgttcctgagaggtcagtttcctcctctccagccctccaggagtattcacacacaaccaacttccccacctcttgcagtcctgtcagatttagccacagactgcccaaacccaggtacaggaatttagaatttccccaaaattagaagaaaagtggttgtaggggatgttttactactgatcaaaatctttgtgagtactttagctgacatcaatcatagcaaagcttgtccgatgtcctcctatcctttcagcattgaacaattatttttactaatttacactaccacctcacctggtcctcagtcagaaacagcgcgagtgcgcgcgcacacaccccagtgtgtctgacctgcacgatctggatgaagagagagggggtgmgagagggcaggcggggactgcaacctcagtccacagacggcccgagaccctcgtccccggccctttgcacaggtgagggaactaaacctgtgcaagatgggagaccggggtgggaggaaggactggtccaaagcgccacgatccttgacgggcacagccagaagctgcacctggccgagaacgccgagcctgaggagcagtccgctgcgtaggcgtcccacgcaggcccacactgcccctctcattytcttcaaactgtgactttttacagactcgggcgggtgttctgcggccccccaggtgctatgggggaggggggcgttgaatggaattaaaccagaaagaaagc

SEQ ID NO: 37 - DNA, 3657 bp, Homo sapiens
tagtaagacaggtgccttcagttcactctcagtaaggggctggttgcctgcatgagtgtgtgctctgtgtcactgtggattggagttgaaaaagcttgactggcgtcattcaggagctggatggcgtgggacatgtgcaaccaggactctgagtctgtatggagtgacatcgagtgtgctgctctggttggtgaagaccagcctctttgcccagatcttcctgaacttgatctttctgaactagatgtgaacgacttggatacagacagctttctgggtggactcaagtggtgcagtgaccaatcagaaataatatccaatcagtacaacaatgagccttcaaacatatttgagaagatagatgaagagaatgaggcaaacttgctagcagtcctcacagagacactagacagtctccctgtggatgaagacggattgccctcatttgatgcgctgacagatggagacgtgaccactgacaatgaggctagtccttcctccatgcctgayggcacccctccaccccaggaggcagaagagccgtctctacttaagaagctcttactggcaccagccaacactcagctaagttataatgaatgcagtggtctcagtacccagaaccatgcaaatcacaatcacaggatcagaacaaaccctgcaattgttaagactgagaattcatggagcaataaagcgaagagtatttgtcaacagcaaaagccacaaagacgtccctgctcggagcttctcaaatatctgaccacaaacgatgaccctcctcacaccaaacccacagagaacagaaacagcagcagagacaaatgcacctccaaaaagaagtcccacacacagtcgcagtcacaacacttacaagccaaaccaacaactttatctcttcctctgaccccagagtcaccaaatgaccccaagggttccccatttgagaacaagactattgaacgcaccttaagtgtggaactctctggaactgcaggcctaactccacccaccactcctcctcataaagccaaccaagataacccttttagggcttctccaaagctgaagtcctcttgcaagactgtggtgccaccaccatcaaagaagcccaggtacagtgagtcttctggtacacaaggcaataactccaccaagaaagggccggagcaatccgagttgtatgcacaactcagcaagtcctcagtcctcactggtggacacgaggaaaggaagaccaagcggcccagtctgcggctgtttggtgaccatgactattgccagtcaattaattccaaaacrgaaatactcattaatatatcacaggagctccaagactctagacaamtagaaaataaagatgtctcctctgattggcaggggcagatttgttcttccacagattcagaccagtgctacctgagagagacttyggaggcaagcaagcaggtctctccttgcagcacaagaaaacagctccaagaccaggaaatccgagccgagctgaacaagcacttcggtcatcccagtcaagctgtttttgaygaygaagcagacaagaccrgtgaactgagggacagtgatttcagtaatgaacaattctccaaactacctatgtttataaattcaggactagccatggatggcctgtttgatgacagcgaagatgaaagtgataaactgagctacccttgggatggcacrcaatcctattcattgttcaatgtgtctccttcttgttcttcttttaactctccatgtagagattctgtgtcaccacccaaatccttattttctcaaagaccccaaaggatgcgctctcgttcaaggtccttttctcgacacaggtcgtgttcccgatcaccatattccaggtcaagatcaaggtctccaggcagtagatcctcttcaagatcctgctattactatgagtcaagccactacagacaccgcaygcaccgaaattctcccttgtatgtgagatcacgttcaagatcgccctacagccgtcggcccaggtatgacagctacgaggaatatcagcacgagaggctgaagagggaagaatatcgcagagagtatgagaagcgagagtctgagagggccaagcaaagggagaggcagaggcagaaggcaattgaagagcgccgtgtgatttatgtcggtaaaatcagacctgacacaacacggacagaactgagggaccgttttgaagtttttggtgaaattgaggagtgcacagtaaatctgcgggatgatggagacagctatggtttcattacctaccgttatacctgtgatgcttttgctgctcttgaaaatggatacactttgcgcaggtcaaacgaaactgactttgagctgtacttttgtggacgcaagcaatttttcaagtctaactatgcagacctagattcaaactcagatgactttgaccctgcttccaccaagagcaagtatgactctctggattttgatagtttactgaaagaagctcagagaagcttgygcaggtaacatgttccctagctgaggatgacagagggatggcgaatacctcatgggacagcgcgtccttccctaaagactattgcaagtcatacttaggaatttctcctactttacactctctgtacaaaaacaaaacaaaacaacaacaatacaacaagaacaacaacaacaataacaacaatggtttacatgaacacagctgctgaagaggcaagagacagaatgccatgtaaatgtccaaaatgttgatcttccactgcaaatttcaaaagccttgtcaatggtcaagcgtgcagcttgttcagcggttctttctgaggagcggacaccgggttacattactaatgagagttgggtagaactctctgagatgtgttcagatagtgtaattgctacattctctgatgtagttaagtatttacagatgttaaatggagtatttttattttatgtatatactatacaacaatgttcttttttgttacagctatgcactgtaaatgcagccttcttttcaaaactgctaaatttttcttaatcaagaatattcaaatgtaattatgaggtgaaacaattattgtacactaacatatttagaagctgaacttactgcttatatatatttgattgtaaaaacaaaaagacagtgtgtgtgtctgttgagtgcaacaagagcaaaatgatgctttccgcacatccatcccttaggtgagcttcaatctaagcatcttgtcaagaaatatcctagtcccctaaaggtattaaccacttctgcgatatttttccacattttcttgtcgcttgtttttctttgaagttttatacactggatttgttaggggaatgaaattttctcatctaaaatttttctagaagatatcatgattttatgtaaagtctctcaatgggtaaccattaagaaatgtttttattttctctatcaacagtagttttgaaactagaagtcaaaaatctttttaaaatgctgttttgttttaatttttgtgattttaatttgatacaaaatgctgaggtaataattatagtatgatttttacaataattaatgtgtgtctgaagactatctttgaagccagtatttctttcccttggcagagtatgacgatggtatttatctgtattttt

SEQ ID NO: 38 - DNA, 6307 bp, Homo sapiens
tagtaagacaggtgccttcagttcactctcagtaaggggctggttgcctgcatgagtgtgtgctctgtgtcactgtggattggagttgaaaaagcttgactggcgtcattcaggagctggatggcgtgggacatgtgcaaccaggactctgagtctgtatggagtgacatcgagtgtgctgctctggttggtgaagaccagcctctttgcccagatcttcctgaacttgatctttctgaactagatgtgaacgacttggatacagacagctttctgggtggactcaagtggtgcagtgaccaatcagaaataatatccaatcagtacaacaatgagccttcaaacatatttgagaagatagatgaagagaatgaggcaaacttgctagcagtcctcacagagacactagacagtctccctgtggatgaagacggattgccctcatttgatgcgctgacagatggagacgtgaccactgacaatgaggctagtccttcctccatgcctgayggcacccctccaccccaggaggcagaagagccgtctctacttaagaagctcttactggcaccagccaacactcagctaagttataatgaatgcagtggtctcagtacccagaaccatgcaaatcacaatcacaggatcagaacaaaccctgcaattgttaagactgagaattcatggagcaataaagcgaagagtatttgtcaacagcaaaagccacaaagacgtccctgctcggagcttctcaaatatctgaccacaaacgatgaccctcctcacaccaaacccacagagaacagaaacagcagcagagacaaatgcacctccaaaaagaagtcccacacacagtcgcagtcacaacacttacaagccaaaccaacaactttatctcttcctctgaccccagagtcaccaaatgaccccaagggttccccatttgagaacaagactattgaacgcaccttaagtgtggaactctctggaactgcaggcctaactccacccaccactcctcctcataaagccaaccaagataacccttttagggcttctccaaagctgaagtcctcttgcaagactgtggtgccaccaccatcaaagaagcccaggtacagtgagtcttctggtacacaaggcaataactccaccaagaaagggccggagcaatccgagttgtatgcacaactcagcaagtcctcagtcctcactggtggacacgaggaaaggaagaccaagcggcccagtctgcggctgtttggtgaccatgactattgccagtcaattaattccaaaacrgaaatactcattaatatatcacaggagctccaagactctagacaamtagaaaataaagatgtctcctctgattggcaggggcagatttgttcttccacagattcagaccagtgctacctgagagagacttyggaggcaagcaagcaggtctctccttgcagcacaagaaaacagctccaagaccaggaaatccgagccgagctgaacaagcacttcggtcatcccagtcaagctgtttttgaygaygaagcagacaagaccrgtgaactgagggacagtgatttcagtaatgaacaattctccaaactacctatgtttataaattcaggactagccatggatggcctgtttgatgacagcgaagatgaaagtgataaactgagctacccttgggatggcacrcaatcctattcattgttcaatgtgtctccttcttgttcttcttttaactctccatgtagagattctgtgtcaccacccaaatccttattttctcaaagaccccaaaggatgcgctctcgttcaaggtccttttctcgacacaggtcgtgttcccgatcaccatattccaggtcaagatcaaggtctccaggcagtagatcctcttcaagatcctgctattactatgagtcaagccactacagacaccgcaygcaccgaaattctcccttgtatgtgagatcacgttcaagatcgccctacagccgtcggcccaggtatgacagctacgaggaatatcagcacgagaggctgaagagggaagaatatcgcagagagtatgagaagcgagagtctgagagggccaagcaaagggagaggcagaggcagaaggcaattgaagagcgccgtgtgatttatgtcggtaaaatcagacctgacacaacacggacagaactgagggaccgttttgaagtttttggtgaaattgaggagtgcacagtaaatctgcgggatgatggagacagctatggtttcattacctaccgttatacctgtgatgcttttgctgctcttgaaaatggatacactttgcgcaggtcaaacgaaactgactttgagctgtacttttgtggacgcaagcaatttttcaagtctaactatgcagacctagattcaaactcagatgactttgaccctgcttccaccaagagcaagtatgactctctggattttgatagtttactgaaagaagctcagagaagcttgygcaggtaacatgttccctagctgaggatgacagagggatggcgaatacctcatgggacagcgcgtccttccctaaagactattgcaagtcatacttaggaatttctcctactttacactctctgtacaaaaacaaaacaaaacaacaacaatacaacaagaacaacaacaacaataacaacaatggtttacatgaacacagctgctgaagaggcaagagacagaatgatatccagtaagcacatgtttattcatgggtgtcagctttgcttttcctggagtctcttggtgatggagtgtgcgtgtgtgcatgtatgtgtgtgtgtatgtatgtgtgtggtgtgtgtgcttggtttaggggaagtatgtgtgggtacatgtgaggactgggggcacctgaccagaatgcgcaagggcaaaccatttcaaatggcagcagttccatgaagacacrcttaaaacctagaacttcaaaatgttcgtattctattcaaaaggaaawatatatatatatatatatatatatataaattaaaaaggaaagaaaactaacaaccaaccaaccaaccaaccaaccacaaaccaccctaaaatgacagccgctgatgtctgggcatcagcctttgtactctgtttttttaagaaagtgcagaatcaacttgaagcaagctttctctcataacgtaatgattatatgacaatcctgaagaaaccacaggttccatagaactaatatcctgtctctctctctctctctctctctctyttttttttttctttttccttttgccatggaatctgggtgggagaggatactgcgggcaccagaatgctaaagtttcctaacattttgaagtttctgtagttcatccttaatcctgacacccatgtaaatgtccaaaatgttgatcttccactgcaaatttcaaaagccttgtcaatggtcaagcgtgcagcttgttcagcggttctttctgaggagcggacaccgggttacattactaatgagagttgggtagaactctctgagatgtgttcagatagtgtaattgctacattctctgatgtagttaagtatttacagatgttaaatggagtatttttattttatgtatatactatacaacaatgttcttttttgttacagctatgcactgtaaatgcagccttcttttcaaaactgctaaatttttcttaatcaagaatattcaaatgtaattatgaggtgaaacaattattgtacactaacatatttagaagctgaacttactgcttatatatatttgattgtaaaaacaaaaagacagtgtgtgtgtctgttgagtgcaacaagagcaaaatgatgctttccgcacatccatcccttaggtgagcttcaatctaagcatcttgtcaagaaatatcctagtcccctaaaggtattaaccacttctgcgatatttttccacattttcttgtcgcttgtttttctttgaagttttatacactggatttgttaggggaatgaaattttctcatctaaaatttttctagaagatatcatgattttatgtaaagtctctcaatgggtaaccattaagaaatgtttttattttctctatcaacagtagttttgaaactagaagtcaaaaatctttttaaaatgctgttttgttttaatttttgtgattttaatttgatacaaaatgctgaggtaataattatagtatgatttttacaataattaatgtgtgtctgaagactatctttgaagccagtatttctttcccttggcagagtatgacgatggtatttatctgtattttttacagttatgcatcctgtataaatactgatatttcattcctttgtttactaaagagacatatttatcagttgcagatagcctatttattataaattatgagatgatgaaaataataaagccagtggaaattttctacctaggatgcatgacaattgtcaggttggagtgtaagtgcttcatttgggaaattcagcttttgcagaagcagtgtttctacttgcactagcatggcctctgacgtgaccatggtgttgttcttgatgacattgcttctgctaaatttaataaaaacttcagaaaaacctccattttgatcatcaggatttcatctgagtgtggagtccctggaatggaattcagtaacatttggagtgtgtattcaagtttctaaattgagattcgattactgtttggctgacatgacttttctggaagacatgatacacctactactcaattgttcttttcctttctctcgcccaacacgatcttgtaagatggatttcacccccaggccartgcagctaattttgatagctgcattcatttatcaccagcatattgtgttctgartgaatccactgtttgtcctgtcggatgcttgcttgattttttggcttcttatttctaagtagatagaaagcaataaaaatactatgaaatgaaagaacttsttcacaggttctgcgttacaacagtaacacatctttaatccgcctaattcttgttgttctgtaggttaaatgcaggtattttaactgtgtgaacgccaaactaaagtttacagtctttctttctgaattttgagtatcttctgttgtagaataataataaaaagactattaagagcaataaattatttttaagaaatcgagatttagtaaatcctattatgtgttcaaggaccacatgtgttctctattttgcctttaaatttttgtgaaccaattttaaatacattctcctttttgccctggattgttgacatgagtggaatacttggtttcttttcttacttatcaaaagacagcactacagatatcatattgaggattaatttatcccccctacccccagcctgacaaatattgttaccatgaagatagttttcctcaatggacttcaaattgcatctagaattagtggagcttttgtatcttctgcagacactgtgggtagcccatcaaaatgtaagctgtgctcctctcatttttatttttatttttttgggagagaatatttcaaatgaacacgtgcaccccatcatcactggaggcaaatttcagcatagatctgtaggatttttagaagaccgtgggccattgccttcatgccgtggtaagtaccacatctacaattttggtaaccgaactggtgctttagtratgtggatttttttcttttttaaaagagatgtagcagaataattcttccagtgcaacaaaatcaattttttgctaaacgactccgagaacaacagttgggctgtcaacattcaaagcagcagagagggaactttgcactattggggtatgatgtttgggtcagttgataaaaggaaaccttttcatgcctttagatgtgagyttccagtaggtaatgattatgtgtcctttcttgatggctgtaatgagaacttcaatcactgtagtctaagacctgatctatagatgacctagaatagccatgtactataatgtgatgattctaaatttgtacctatgtgacagacattttcaataatgtgaactgctgatttgatggagctactttaagatttgtaggtgaaagtgtaatactgttggttgaactatgctgaagagggaaagtgagcgattagttgagcccttgccgggccttttttccacctgccaattctacatgtattgttgtggttttattcattgtatgaaaattcctgtgattttttttaaatgtgcagtacacatcagcctcactgagctaataaagggaaacgaatgtttcaaatct

SEQ ID NO: 39 - DNA, 516 bp, Homo sapiens
aaagttagccaaacttcaggctcaggtccagataggaggcaagggtacagcttgcaaaacaaaggtggaacctagagagttacagcagatgacagaaagcttcagagttccgtaactaaactggctgtgaataatatagctggtattaaagaggtgaacatgattgaagatgggacagtttttcatttcaacgatcccaaagtctaacctctgtctgccccctctctgttaacatctttgsaattacctctctctgctcctctctctagttcttctctctctgctaacacctttgcagttaccagtcatgcagaagccaaaccaatcacagaaatgtttcctggaatattaagtcagcttggtgctgacagcttaacaagtctcaggaagttagccaaacagttcccatggcaagtcttgaatagcaaagcaccaaacccagaagacaatgatgaggaggaggatgtttcagatcttgtagaatattttggtgaggcatcaaagaatgaagctaac

SEQ ID NO: 40 - DNA, 1395 bp, Homo sapiens
gaagggccaaatccatcgtggactaactctgtgggtagagctcagatgacctagggagaaatataagatgtaacttaagctaaatgtaatctatttataaagcaagagactctcatctatttttatgaaaggaagggttttttaatctagggtaggcagttgtggtagcccagcattttcctgtggacgagacatggtgcatgttgttgctggattgaatggaacccattcctgtccccyggcctcgtcttctgtcctcacttttggtcatccacacccatgagcagcttcagcagagtgtaggtcccacttcaccccattctcctctcctctgacccctcagctccttggaagtcttggggtggggatctgagggggtgggtgggctgcaggaaattcagaaatgtggtgggtgggggaagggacaaggcgcattagggagggaacaagctgggctctggggataggctctgattaattagttactctgactctggtctgccgagatccatttccaacccagttgcgttgggagagggttgggaggcagcagagcatgggtracagtgggagcacacgacttccttggagcctgggcctttgcgggtcccaggtggtcaggcagctggagcaraagtggaaatggcttaagatgctcatagcccagccccggctgtgtctactccaggccaagcctgggctgcagtccttgctatgttccccccagggccctgrggggagggatcagggtgctgggggtttcctaggacaggggtcttcccccttgagacaccaagctctggctctagaagagctctctcctggagtggggagtctggaggggactgggtgggtgcaggtaaagccagattctctctggaagggaattttctakgaatggatgatttccaggctcagggtgggctgtgtgttagttctgagcaaatccctcaccaagacccttccctcccaagccctcaaagaaatgaggcaaagcccttccctgcaagaccccttgtggaygtttttgcatctacctgatttttagccccacccagggagactttataccccatgatcctgccccaccgttgctgttgtctgccagctgggtctagcatcacagggaagggggggatttatactcayggaaagactactgatcctaccggaaaccaacctgtttactgtactgttgtaaatatcatgccctttatatcctgtatattggcttcttttaaataaagtgaaatgtcttagaactgatggtgcttttttttgtttttgtttttaaacagaagatgaatctggtgttgggggaggggtaggaggacggaaggccacagaaaccctcaaactcattagttaattagccataaaataggggatttcata

SEQ ID NO: 41 - DNA, 2717 bp, Homo sapiens
acttaaaagtgaggggaaaactgagacaacaatgcaagtgggtaatagtcaaacaaaagttaaaggtgaagattcaaaaaatataccattggagamagaaacaagaaaatcactggtttcagattcaggtggacaaaggacaagtgataaaatccaagaatatccacagctcagagaagaaacgatctagccctgctatttcagatctttcacagatccttaagtctcaagatgaatcagcatttttagagagttcaaatgaagtttcagttgctgaaaaccaatcctataaatctccatcagagacccatgataaatcacttacaayagtatcatccagcaaagaagttcaagattcactgtctgttggaacattggctcaaaaaaacgaaacagtgatatcaccattcattttacctcctgttcttacagaaagtaaaaaggctgatgtttcagaagaacaattacaaaagatgactgaagaacaaacttaccaagcagcagaaaaatctcaagctcataatgaagtaccaaatgaaaggcttgtagttgagcatcaagaatcattgtcaaaaaccaaattacaartaaagaaacaagaaacttctacagagcaaccactcaccactcctgataaagaaccaaatgaaaatcttatacttaggcatcaagactcaatgtcaaaatcagaaatgcaagtgaaggaacaaagaactctcaaagggcaaagaattattactcatgatgaagaaccaggcaaaaatcttgtgcttgaacatcaagattcagtgtcaaaactggaaatgcaaattgaaaaaaccaaaaaacttcctagagagaaaagacatagtactcatgatgaagaatcaggtgaaaatcctatgcttaaacatcaagattcagtgtcaaaaatccaagtgcaattagagattcaagaaacttctgaaggagaaggacgtagcataccagataaaaattctatgtttgttcatcaagattcagtgtcaaaactccaaatgcaagaaaagraaaaaataactcctggaagggaaaggcgtaatactcrtattgtagtaccaaatgaaaatgtgatttctgttcatcaagattcaaagtcaaaactccaaatgcaagaaaagaaacaaataaattctggagtggaaagacacaagacgtttcctttagaaatcaaaaaaaaggatatatcacttgaacatctgttgcctgaggagaaagttttattatcaagaagcgaatctcaaacsaagaaacttcaagctaaagtaacttcaagaaaaaagactgatatagaaagcttgagaggtgctttgggaagacgcttattaaatgatgaattcaagacacagtcaaagagtttccctgggcctgatatagaacaattgacagatgcatttggaagagatatactaaaggatgaattcaagacacgatcaaagagtctccctgagrctgatgaacgattgcatagtacaactgagagaggtacaataaatgatgcaattaagacgcagttaaagagaaagagttaccctgagactgtcttaaaacacttgaaaggtgttaayggaaaagatataataaagcatctaatcaacatacagtcaaagagtcatgsagagactgataagaacttctttgcctatgctactggaagaggtctaatgaaggagtcaaccacgacacaattaaaaagtcacccagagactgataaggaattcttggcagatgctattggaagaggtataataatagggccaatcactacacaactgaagagtcaccgagagactgataaagaactcttaaaagatgctattggaagagatataataaagggaccaatcagtgcacaattaaagagtcaccaggagactgatgtagaacccttgacaaatgccattggttcaagtaaaacaattggtgagataaagacacaactaaggactcactatgatgtgaacttatttaaaaacaaagataygtccgtacaacgtcaagaaggtatctttactaggagcattacaccaagtaaattcccaacaaaagtgatcaatttatcaccctttgaaaataaagaggaaacttatgagtactcttcaccctatgtgactgcaccttcaaaagcaatttatagaacatatagggctggtccaagcttttctaaagacatccaccttcctttactgaatcaactcccttcagggcattcgaaagttgttaccttaagccaaaaaactattgaatttactctgcctactgtgaccaatacarttggaaaacctacctataaagtgttacatgctgctgcccgaaaatctgtaccacacccatacttttgagaatgaaggaaattctgagcaagataagcaacatgacaaattcagaaatgcaggaaaggaaattgcaagtatagaagccttttgaaaataatactgactcrtgtggatggtgcttattgaaaaacagctggaaatacagtggatcaacagggtaggcccagatcacagaaggcctgaccaggcagtgaatgtgtctttaccatatggaacaattttgaacttctaagatcaagcctttttgttgctgagggtaagaaaggagctctgtgatgaggttccagcttacttctattcgccagtgtccctgtaatgctttctggtgtgatgtaaaatcaattaaacaaaacttgtgctctg

SEQ ID NO: 42 - DNA, 1929 bp, Homo sapiens
gggtcgcgctctaagtgaggcgccaagcggtctccgcctcagkgtctgaggctgcgaaaggggcgtaacgatgagcggttcctgccagaggtctggggaggataaaaagcaggaggaagaggcgacggcggcctgtggacgtcttgcaggggtccccgaagccaagcagggtcccaaggccgattcagactccgacctagagacggaaggtgctcggggcaggggccaggcccgtctcctccccttgggggcttctcccgcaggggttgtgggaggtgggctggcgccgccgaggaggcaggagacctctgtccagcagggcacgtagccctctgcggggcgtctccagccccctgccctctcctcggcgctcctggcggcatcaggaactttaccatgagaaggcgcttctagaaggaggttaaaatggaaaatcccgccagacagtgcaccaaaggctgtcccgccctgaaatgcaatcagagctgggttttcccaatccacagatgtggacctgtyggagaaccagctgggagtggcaggagcccaggccctctgtgccgccctcacagtgaaccaggccatgcggaagatgcagctgtcagggaatggcctggaggagcaggcggcccagcaccttgmygaactcctgctggcccacacagacctgaagtccctggacctgagctacaaccagctgaatgaccaagcagatctgtgcatgggactgcagggcttcctcatcttccacagctttgggggcggcactggctctgggttcgtgtctctgctcatgaagcggctctcggtggactacgggaagaagtccaagctggagtttgccatttgcccagccccccaggtctccatggccatgacggagccctacarctccatcctgaccacctacacgaccctggaacattctgactgtgccttcatagtcracagcaaagccacctatgacatgtcagcacaacctggacatcgagtgtcccaygtacaccaacctcagtcgtctgggcagatcgtgtcctccatcacggcctccctgtgattygatggggccctgaatgtgtacttgacagaattccaaaccaacttggtgccrtacccccacatccacctccccctggccacctacgycctggtcatctcagccaagaaggcctaccatgagcagctgtccgtggccaagatcgccagtgcccrcttcgagccagccaatcagatggtcwagtgtgaccctcaccatggcaagtacatggsctgctgcatgttgtacagaggggatgtggtcctgaaagatgtcagtgcggctgtcgccaccatcaagagcaagcacaccaaccagtttgtggactggtgtccgattggatttaaggtaggactgggtgatgtggagtccttgtgccatcaggaagcaggagacctgcagaataatgctgcccctgaaggcccgcatcctttatggagacaaccccttttcacgtcagctaggttgcaaggataataattttagtaatttatttcctaccgccttatactttaccaaatactttatgttccctcataccttaaccrctaccctttaaarttcatkgggcaatattaccagtatcttacactttagaaaacagaggctgaggctgggcacggtggctcatgcctgtaatcccagcactttgggaggccaaggcaggcagatcacgaggtcaggagattgagacsrtcctggctaacacggtgaaaccccggctctactaaaaaatacaaaaaattagccgggtgtggtggcagacacctgtggtcccagctattcgggaggctgaggcaggaggatggcgtgaacccgggaggcagagcttgcagtgagtcgagattgcaccactgcactccagcctgggcaacagagcgagactacmtctc

SEQ ID NO: 43 - DNA, 2072 bp, Homo sapiens
gggtcgcgctctaagtgaggcgccaagcggtctccgcctcagkgtctgaggctgcgaaaggggcgtaacgatgagcggttcctgccagaggtctggggaggataaaaagcaggaggaagaggcgacggcggcctgtggacgtcttgcaggggtccccgaagccaagcagggtcccaaggccgattcagactccgacctagagacggaaggtgctcggggcaggggccaggcccgtctcctccccttgggggcttctcccgcaggggttgtgggaggtgggctggcgccgccgaggaggcaggagacctctgtccagcagggcacgtagccctctgcggggcgtctccagccccctgccctctcctcggcgctcctggcggcatcaggaactttaccatgagaaggcgcttctagaaggaggttaaaatggaaaatcccgccagacagtgcaccaaaggctgtcccgccctgaaatgcaatcagagctgggttttcccaatccacaggcacccatgsacttggagaactggtcggggacaccctgtacctgaggtcttgctggatccatagcattgtgcccatcttctgctttctgtgccaagggagtgccccagagctgaacctgctgcacggtggcctggggccscagatgtggacctgtyggagaaccagctgggagtggcaggagcccaggccctctgtgccgccctcacagtgaaccaggccatgcggaagatgcagctgtcagggaatggcctggaggagcaggcggcccagcaccttgmygaactcctgctggcccacacagacctgaagtccctggacctgagctacaaccagctgaatgaccaagcagatctgtgcatgggactgcagggcttcctcatcttccacagctttgggggcggcactggctctgggttcgtgtctctgctcatgaagcggctctcggtggactacgggaagaagtccaagctggagtttgccatttgcccagccccccaggtctccatggccatgacggagccctacarctccatcctgaccacctacacgaccctggaacattctgactgtgccttcatagtcracagcaaagccacctatgacatgtcagcacaacctggacatcgagtgtcccaygtacaccaacctcagtcgtctgggcagatcgtgtcctccatcacggcctccctgtgattygatggggccctgaatgtgtacttgacagaattccaaaccaacttggtgccrtacccccacatccacctccccctggccacctacgycctggtcatctcagccaagaaggcctaccatgagcagctgtccgtggccaagatcgccagtgcccrcttcgagccagccaatcagatggtcwagtgtgaccctcaccatggcaagtacatggsctgctgcatgttgtacagaggggatgtggtcctgaaagatgtcagtgcggctgtcgccaccatcaagagcaagcacaccaaccagtttgtggactggtgtccgattggatttaaggtaggactgggtgatgtggagtccttgtgccatcaggaagcaggagacctgcagaataatgctgcccctgaaggcccgcatcctttatggagacaaccccttttcacgtcagctaggttgcaaggataataattttagtaatttatttcctaccgccttatactttaccaaatactttatgttccctcataccttaaccrctaccctttaaarttcatkgggcaatattaccagtatcttacactttagaaaacagaggctgaggctgggcacggtggctcatgcctgtaatcccagcactttgggaggccaaggcaggcagatcacgaggtcaggagattgagacsrtcctggctaacacggtgaaaccccggctctactaaaaaatacaaaaaattagccgggtgtggtggcagacacctgtggtcccagctattcgggaggctgaggcaggaggatggcgtgaacccgggaggcagagcttgcagtgagtcgagattgcaccactgcactccagcctgggcaacagagcgagactacmtctc

SEQ ID NO: 44 - DNA, 1481 bp, Homo sapiens
aacggaccctgggagtcggccatcatgctggccccggaggccgttakcttagtcatggctctaaatatgtacctgcaatcggatgttgaggatcaccgagcccgcgacgtagaagtacgggaagttcatgcgcagctgccaggccagctcgaagaaggcgagcagggtgcgggagagccccttgcagaagacgccgtacgagtttctccagcatttggctctaggtgccaagggcacatgtgacaagaaggtgccagctttataaaccttgkaacttcttctgtgtcagttctgagacatacartttactaaaacacatcatgaaggcctgttttgaagagaaggggaataagactgcatctgttcatatgaggttctccagcatttggctcaaggcyccaagggcacatgtgacaagaaggcgccrgctttttaaacattggaagttcttctgtgtcagttctgtgacagaacatttacttaacacatcatgaaggctagtttggatgtggaggggaatagactccatctatccatatgagctgctgcagaagaatattttgcctgctggaacctgctgtatctactcaagagtggaagttttcacagggagctgacacgtttctcccagcacaaagttgggagtgacaccagagcctcctgcaagatgcttctgattctgctgtcagtggccctgctggccttcagctcagctcaggatttaaatgaagatgtcagccaggaagatgttcccctcgtaatatcagatggaggagactctgagcagttcatagatgaggagcgtcagggaccacctttgggaggacagcaatctcaaccctctgctggtgatgggaaccaggatgatggccctcagcagggaccaccccaacaaggaggccagcagcaacaaggtccaccacctcctcagggaaagccacaaggaccaccccaacagggaggccatccccctcctcctcaaggaaggccacaaggaccaccccaacagggaggccatccccgtcctcctcgaggaaggccacaaggaccaccccaacagggaggccatcagcaaggtcctcccccacctcctcctggaaagccccagggaccacctccccaagggggccgcccacaaggacctccacaggggcagtctcctcagtaatctaggattcaatgacaggaagtgaataagaagataacagtgtttcaaatgccktgaaacatggcatcatgctctaacttcartataccaataaaayaatcagcttgcaatttctgctggtggtgtctctttctgagtgtttgggactctagaatctgagacccatgttcacattgtaagaatatccaggaccccttctccttgatgtttccagcaagcttctctcctccttatccttattaagtcatccacctggggaaggagttccactgtttctttccttctctgtcttctatagctcgaatttaagttg

SEQ ID NO: 45 - DNA, 1310 bp, Homo sapiens
aacggaccctgggagtcggccatcatgctggccccggaggccgttakcttagtcatggctctaaatatgtacctgcaatcggatgttgaggatcaccgagcccgcgacgtagaagtacgggaagttcatgcgcagctgccaggccagctcgaagaaggcgagcagggtgcgggagagccccttgcagaagacgccgtacgaggttctccagcatttggctcaaggcyccaagggcacatgtgacaagaaggcgccrgctttttaaacattggaagttcttctgtgtcagttctgtgacagaacatttacttaacacatcatgaaggctagtttggatgtggaggggaatagactccatctatccatatgagctgctgcagaagaatattttgcctgctggaacctgctgtatctactcaagagtggaagttttcacagggagctgacacgtttctcccagcacaaagttgggagtgacaccagagcctcctgcaagatgcttctgattctgctgtcagtggccctgctggccttcagctcagctcaggatttaaatgaagatgtcagccaggaagatgttcccctcgtaatatcagatggaggagactctgagcagttcatagatgaggagcgtcagggaccacctttgggaggacagcaatctcaaccctctgctggtgatgggaaccaggatgatggccctcagcagggaccaccccaacaaggaggccagcagcaacaaggtccaccacctcctcagggaaagccacaaggaccaccccaacagggaggccatccccctcctcctcaaggaaggccacaaggaccaccccaacagggaggccatccccgtcctcctcgaggaaggccacaaggaccaccccaacagggaggccatcagcaaggtcctcccccacctcctcctggaaagccccagggaccacctccccaagggggccgcccacaaggacctccacaggggcagtctcctcagtaatctaggattcaatgacaggaagtgaataagaagataacagtgtttcaaatgccktgaaacatggcatcatgctctaacttcartataccaataaaayaatcagcttgcaatttctgctggtggtgtctctttctgagtgtttgggactctagaatctgagacccatgttcacattgtaagaatatccaggaccccttctccttgatgtttccagcaagcttctctcctccttatccttattaagtcatccacctggggaaggagttccactgtttctttccttctctgtcttctatagctcgaatttaagttg

SEQ ID NO: 46 - DNA, 1585 bp, Homo sapiens
aacggaccctgggagtcggccatcatgctggccccggaggccgttakcttagtcatggctctaaatatgtacctgcaatcggatgttgaggatcaccgagcccgcgacgtagaagtacgggaagttcatgcgcagctgccaggccagctcgaagaaggcgagcagggtgcgggagagccccttgcagaagacgccgtacgagtttctccagcatttggctctaggtgccaagggcacatgtgacaagaaggtgccagctttataaaccttgkaacttcttctgtgtcagttctgagacatacartttactaaaacacatcatgaaggcctgttttgaagagaaggggaataagactgcatctgttcatatgaggttctccagcatttggctcaaggcyccaagggcacatgtgacaagaaggcgccrgctttttaaacattggaagttcttctgtgtcagttctgtgacagaacatttacttaacacatcatgaaggctagtttggatgtggaggggaatagactccatctatccatatgagagttggagtctcactctgttatccaggctggagttcagtggtaggatcatggcttactgcagtctggaactcctgggctcaaaccatcctcccacctcagccttctgctgcagaagaatattttgcctgctggaacctgctgtatctactcaagagtggaagttttcacagggagctgacacgtttctcccagcacaaagttgggagtgacaccagagcctcctgcaagatgcttctgattctgctgtcagtggccctgctggccttcagctcagctcaggatttaaatgaagatgtcagccaggaagatgttcccctcgtaatatcagatggaggagactctgagcagttcatagatgaggagcgtcagggaccacctttgggaggacagcaatctcaaccctctgctggtgatgggaaccaggatgatggccctcagcagggaccaccccaacaaggaggccagcagcaacaaggtccaccacctcctcagggaaagccacaaggaccaccccaacagggaggccatccccctcctcctcaaggaaggccacaaggaccaccccaacagggaggccatccccgtcctcctcgaggaaggccacaaggaccaccccaacagggaggccatcagcaaggtcctcccccacctcctcctggaaagccccagggaccacctccccaagggggccgcccacaaggacctccacaggggcagtctcctcagtaatctaggattcaatgacaggaagtgaataagaagataacagtgtttcaaatgccktgaaacatggcatcatgctctaacttcartataccaataaaayaatcagcttgcaatttctgctggtggtgtctctttctgagtgtttgggactctagaatctgagacccatgttcacattgtaagaatatccaggaccccttctccttgatgtttccagcaagcttctctcctccttatccttattaagtcatccacctggggaaggagttccactgtttctttccttctctgtcttctatagctcgaatttaagttg

SEQ ID NO: 47 - DNA, 1414 bp, Homo sapiens
aacggaccctgggagtcggccatcatgctggccccggaggccgttakcttagtcatggctctaaatatgtacctgcaatcggatgttgaggatcaccgagcccgcgacgtagaagtacgggaagttcatgcgcagctgccaggccagctcgaagaaggcgagcagggtgcgggagagccccttgcagaagacgccgtacgaggttctccagcatttggctcaaggcyccaagggcacatgtgacaagaaggcgccrgctttttaaacattggaagttcttctgtgtcagttctgtgacagaacatttacttaacacatcatgaaggctagtttggatgtggaggggaatagactccatctatccatatgagagttggagtctcactctgttatccaggctggagttcagtggtaggatcatggcttactgcagtctggaactcctgggctcaaaccatcctcccacctcagccttctgctgcagaagaatattttgcctgctggaacctgctgtatctactcaagagtggaagttttcacagggagctgacacgtttctcccagcacaaagttgggagtgacaccagagcctcctgcaagatgcttctgattctgctgtcagtggccctgctggccttcagctcagctcaggatttaaatgaagatgtcagccaggaagatgttcccctcgtaatatcagatggaggagactctgagcagttcatagatgaggagcgtcagggaccacctttgggaggacagcaatctcaaccctctgctggtgatgggaaccaggatgatggccctcagcagggaccaccccaacaaggaggccagcagcaacaaggtccaccacctcctcagggaaagccacaaggaccaccccaacagggaggccatccccctcctcctcaaggaaggccacaaggaccaccccaacagggaggccatccccgtcctcctcgaggaaggccacaaggaccaccccaacagggaggccatcagcaaggtcctcccccacctcctcctggaaagccccagggaccacctccccaagggggccgcccacaaggacctccacaggggcagtctcctcagtaatctaggattcaatgacaggaagtgaataagaagataacagtgtttcaaatgccktgaaacatggcatcatgctctaacttcartataccaataaaayaatcagcttgcaatttctgctggtggtgtctctttctgagtgtttgggactctagaatctgagacccatgttcacattgtaagaatatccaggaccccttctccttgatgtttccagcaagcttctctcctccttatccttattaagtcatccacctggggaaggagttccactgtttctttccttctctgtcttctatagctcgaatttaagttg

SEQ ID NO: 48 - DNA, 900 bp, Homo sapiens
atgataacttttctgcccatcatattttccattctagtagtggttacatttgttattggaaattttgctaatggcttcatagcgttggtaaattccaccgagtgggtgaagagacaaaagatctcctttgctgaccaaattgtcactgctctggcggtctccagagttggtttgctctgggtgttattattaaattggtattcaactgtgttgaatccagctttttrtagtgtagaattaagaactactgcttataatatctgggcagtaaccggccatttcagcaactggcctgctactagcctcagcatattttatttgctcaagattgccaatttctccaaccttatttttcttcgcttaaagaggagagttaagagtgtcattctggtgrtgctgttggggcctttgctatttttggcttgtcatctttttgtggtaaacatgaatcagattgtatggacaaaagaatatgaaggaaacatgacttggaagatcaaattgaggcgtgcaatgtacctttcagatacgactgtaaccatgctagcaaacttagtaccctttactgtaaccctgatatcttttctgctgttagtctgttctctgtgtaaacatctcaagaagatgcagctccatggcaaaggatctcaagatcccagtaccaaggtccacataaaagttttgcaaactgtgatctccttcytcttgttaygtgccatttactttgtgtctgtaataatatcagtttggagttttaagaatctggaaaacaaacctgtcttcatgttctgccaagctattggattcagctgttcttcagcccacccgttcatcctgatttggggaaacaagaagctaaagcagacttatctttcagttttgtggcaaatgasgtactgr

SEQ ID NO: 49 - DNA, 1363 bp, Homo sapiens
ctaaattggcatggtattggattgctgactagaaatacttctatctcaaccttataaccaactggctgttttaccttggtttctgatgaagaattgaaaagaagagtagctgaggagctggcattggagcaagccaagaaagaatccgaagatcagaaacgactaaagcaagccaaagagctggaccgagagagggctgctgccaatgagcagttaaccagagccatccttcgggagaggatatgtagcgaggaggaacgcgctaaggcaaagcacctggctaggcagctggaagagaaagaccgagtgctaaagaagcaggatgcattctacaaagaacagctggctagactggaggagaggagctcagagttctacagagtcaccactgaacaatatcagaaagctgctgaagaggtggaagcaaagttcaagcgatatgagtctcatccagtctgtgctgatctgcaggccaaaattcttcagtgttaccgtgagaacacccaccagaccctcaaatgctcygctctggccacccagtatatgcactgtgtcaatcatgccaaacagagcatgcttgagaagggaggataaaaactttcagaatgagcaaaacaccatcaacgttaattccagagatggaacattttttttcctagtgagaaaacaacccatttgaagagaagaccactaatgagaagaccactaaagagagacatcaagaatggattcagcagaatcatttcacgttttgaacagcagcagtttgaagggccaaagccttgatcagggatcagtcattaaaggacactcttgagtattagtaaaccctcttatgatgattaaaagagaagggcagccctctccaccttttggtactttctattcaacttgcactgaccataaaatgtttctcttctgaacaagccccatcatttggtgaacctccaccctaacaaagtaggatggggttgggggctaaattaattggagtggggcgaggagagagccagaaaacatagatccgagggcagcagtgctgggtggagagagccagaaaacagatctggaggcagcagtgctggatggaattgtctaggctgtggcatgttggttttgtctttcttttctcctttgattatgtaagagctatttcattataacttattatggtgattatacaggcaagaagacaaaaaggagagaaaatgtacctcttctactggaataatgtttatgattacaagtgagataaggtatttttatcaatatgaaggcaaccttggctgataaaacctctatagtgaatactcacatctttacttcactcactatcaataataaatatattttctgacaaaga

SEQ ID NO: 50 - DNA, 1740 bp, Homo sapiens
accacctgttgccatagcatccgggtcgggtgaaccaatccgggcgccctcgccgaacagaggcgggcagttcgcatcgccgaccaacctgaggcgtttttgttgtggcgcgtgaccggargaggcgggagctcaggaccggcgccttctccttgcttctgggggtcgtggccttgctcccgctgtgcgggaaaagaatccaggcccttccacgcgcgtgtgggtgcgggggccccgaagtgctcgtggttccccgctaggtctccgctggggcaggaaccggaatcatgggtgggaccaccagcacccgccgggtcaccttcgaggcggacgagaatgagaacatcaccgtggtgaagggcatccggctttcggaaaatgtgattgatcgaatgaaggaatcctctccatctggttcgaagtctcagcggtattctggtgcttatggtgcctcagtttctgatgaagaattgaaaagaagagtagctgaggagctggcattggagcaagccaagaaagaatccgaagatcagaaacgactaaagcaagccaaagagctggaccgagagagggctgctgccaatgagcagttaaccagagccatccttcgggagaggatatgtagcgaggaggaacgcgctaaggcaaagcacctggctaggcagctggaagagaaagaccgagtgctaaagaagcaggatgcattctacaaagaacagctggctagactggaggagaggagctcagagttctacagagtcaccactgaacaatatcagaaagctgctgaagaggtggaagcaaagttcaagcgatatgagtctcatccagtctgtgctgatctgcaggccaaaattcttcagtgttaccgtgagaacacccaccagaccctcaaatgctcygctctggccacccagtatatgcactgtgtcaatcatgccaaacagagcatgcttgagaagggaggataaaaactttcagaatgagcaaaacaccatcaacgttaattccagagatggaacattttttttcctagtgagaaaacaacccatttgaagagaagaccactaatgagaagaccactaaagagagacatcaagaatggattcagcagaatcatttcacgttttgaacagcagcagtttgaagggccaaagccttgatcagggatcagtcattaaaggacactcttgagtattagtaaaccctcttatgatgattaaaagagaagggcagccctctccaccttttggtactttctattcaacttgcactgaccataaaatgtttctcttctgaacaagccccatcatttggtgaacctccaccctaacaaagtaggatggggttgggggctaaattaattggagtggggcgaggagagagccagaaaacatagatccgagggcagcagtgctgggtggagagagccagaaaacagatctggaggcagcagtgctggatggaattgtctaggctgtggcatgttggttttgtctttcttttctcctttgattatgtaagagctatttcattataacttattatggtgattatacaggcaagaagacaaaaaggagagaaaatgtacctcttctactggaataatgtttatgattacaagtgagataaggtatttttatcaatatgaaggcaaccttggctgataaaacctctatagtgaatactcacatctttacttcactcactatcaataataaatatattttctgacaaaga

SEQ ID NO: 51 - DNA, 5767 bp, Homo sapiens
gtgaccacggaccaggcagtctctaatgaataggcaaggccacaacctccwttctcccagaaaagaagaaatgctcatctgaaattcatcacctctctggagtcttcaaactgaccaagcattgaaaagaacacagtttcagaaaacagtttccagtgcctctggccttcctactgaaagcagacacagagtgcatgaagaccgttcaaatatgtcagggacctcctcccatgagtccttctatgactccctctcagacatgcaggaagaaagcaagaatactgacttcttcccgggcctttctgctttcctcagccaggaagagataaacaagagtcttgacctggcccggagagccatagccgactccgaaacagaagattttgactcggaaaargagatctcgcagattttcagtacttctcctgcaagcctctgtgaacatccttcccataaggagaccaaattgggtgaacacgcctcgaggagacctcaggataacaggtcaacacctgtccagcctctggcagagaaacaaactaagagtatctcttcacctgtttcaaagaggaaacctgccatgtcacccctgctcaccaggcccagctacatccggagcctccgaaaggctgaaaagcgtggtgcaaaaactcccagcacaaacgtaaagcccaaaacgccacatcaaagaaagggtggcccccagagccagctgtgtgacaaggcagctaatttaattgaggagctaacatccatatttaaagccgcaaagccaagaaacagaagcccaaatggggagtcctcgtcaccagacagtgggtacctgtctcctaaaaatcagccgtcagccctgctgagtgcctcagccagccagagccctayrgaagaycaaggggagatggaaagagaggtcaagtcccctggggccaggcattgctaccaggacaaccaggacttggcagtgccacacaaccgcaagtctcacccacagccccacagcgccctccacttcccagctgcacctcgattcatccaaaagctgaggagccaagaagtagcagaagggagccgagtttatctggagtgtagagtcactggaaaccccactcctcgagtcagatggttctgtgaagggaaagaactgcacaacactcctgatattcaaatccactgtgagggaggggacctccataccctgatcatagcagaggcctttgaggacgacacaggtcgctacacctgtttggctacgaatcccagcggctcagacacaacatctgctgaggtgttcattgaaggtgccagttcaacagattctgacagtgaaagtttagctttcaaatcaagagctggagctatgccacaagctcaaaagaaaacaacttctgtttccttgacaataggatcatcatctccaaagacaggggtgaccacagctgtgattcaaccactgtctgtccctgtgcaacaggttcacagtccaacttcatatctctgccgacctgatggaaccactactgcctactttcctcctgtttttacaaaggaactgcaaaacacagccgtggcggaaggccaggtggtggttctggagtgccgggtccgtggggcaccccctctgcaggtccagtggtttcggcaagggagtgaaatccaagactctccagatttccgaattctacagaaaaaacctagatctacagctgaacctgaggagatttgcaccctagttatcgctgagactttccctgaagatgcagggatctttacatgttcagcaagaaatgattatggatcagcaaccagcactgcccagctggttgtcacctcagccaacactgaaaactgtagttacgagtcaatgggagaatccaacaatgaccacttccaacactttccacctccccctccaatcttggagacaagttccttggagttggcttcaaagaaaccatctgagatccagcaggtgaacaaccctgagttaggcctgagcagggcagcccttcaaatgcaattcaatgctgctgagagggaaacgaacggagtccatcccagccgtggagtaaatggactgattaacggcaaagctaacagtaataaatctcttccaacaccagctgtcctgctttcacccactaaggagccaccacctctgcttgccaaaccaaaactaggatttccaaagaaggccagtagaactgctagaatagcctccgatgaggaaattcaaggcacaaaggatgctgttattcaagacctggaacgaaaacttcgcttcaaggaggacctcctgaacaatggccagccgaggttaacatacgaagaaagaatggctcgtcractgctaggtgctgacagtgcaactgtctttaatattcaggagccagaagaggaaacagctaatcaggaatacaaagtctccagctgtgaacagagactcatcagtgaaatagagtacaggctagaaaggtctcctgtggatgaatcaggtgatgaagttcagtatggagatgtgcctgtggaaaatggaatggcaccattctttgagatgaagctgaaacattacaagatctttgagggaatgccagtaactttcacatgtagagtggctggaaatccaaagccaaagatctattggtttaaagatgggaagcagatctctccaaagagtgatcactacaccattcaaagagatctcgatgggacctgctccctccataccacagcctccaccctagatgatgatgggaattatacaattatggctgcaaaccctcagggccgcatcagttgtactggacggctaatggtacaggctgtcaaccaaagaggtcgragtccccggtctccctcaggccatcctcatgtcagaaggcctcgttctagatcaagggacagtggagacgaaaatgaaccaattcaggagcgattcttcagacctcacttcttgcaggctcctggagatctgactgttcaagaaggaaaactctgcagaatggactgcaaagtcagtgggttaccaaccccagatctaagctggcaactagatggaaagcccgtacgccctgacagtgctcacaagatgctggtgcgtgagaacggggtgcactctctgatcatagagccagtcacgtcacgtgatgccggcatctacacatgtatagctaccaaccgagcaggacagaactcattcagcctggagcttgtggttgctgctaaagaagcacacaaaccccctgtgtttattgagaagctccaaaacacaggagttgctgatgggtacccagtgcggctggaatgtcgtgtattgggagtgccaccacctcagatattttggaagaaagaaaatgaatcactcactcacagcactgaccgagtgagcatgcaccaggacaaccacggctacatctgcctgctcattcagggagccacaaaagaagatgctgggtggtatactgtgtcagccaagaatgaagcagggattgtgtcctgtactgccaggctggacgtttacatttctcgacattaatagtgaaccacaccaggagaacaaatacccaacccagtggcatcagcagtcacagagcaccaagccaaaaaaagtacggccctcagccagtcgctatgcagcactttcggaccagggactagacatcaaagcagcgttccaacctgaggccaacccatctcacctgacactgaatactgccttggtagaaagtgaggacctgtaatccagcattcttgttaaagctgaaacactgaaacagccattgccttgaccaacatattcctttgtcacattatgtaaaaggcagaaacatacctttgactataagaaattaaaaaaaaacaccaaaataatatttttcttacttgatataccaaacttagtttaagtagataatgctaatacaaatatacacattgcacagaaaatacacatttactgtccaatttaaaactttggaattgctgtgattaaagtgatcaaaatgccaaaatactaaaggaaatcaattgttcacaggtaactacaatttgtattatctacaagtgcctttaaacacaagatataggtgctgtgtagcctgatagtgtgaaatgtttaatgagggagttgtaccacaaacagtactacaatgattctgaagcacagtgtattcagacagatacagtgaaccaagtgcaatatgtaaggatgaaagaagaagagatgacaaagaaatccaagtaaatgccttgtctttgcaaatgtttttatattaaatcataagggaaggaactacttgccttaaatgttaatatcaaaagagttttctaacaaggttaataccttagttcttaacattttttttctttatgtgtagtgttttcatgctaccttggtaggaaacttatttacaaaccatattaaaaggctaatttaaatataaataatataaagtgctctgaataaagcagaaatatattacagttcattccacagaaagcatccaaaccacccaaatgaccaaggcatatatagtatttggaggaatcaggggtttggaaggagtagggaggagaatgaaggaaaatgcaaccagcatgattatagtgtgttcatttagataaaagtagaaggcacaggagaggtagcaaaggccaggcttttctttggttttcttcaaacataggtgaaaaaaacactgccattcacaagtcaaggaacccagggccagctggaagtgtggagcacacatgctgtggagcacacatgctgtggagattgcagtgtgtctgaggtttgtgtagtagtggaagattttaggtatgtagagcaagttgaaaatggattgagactgcatggtggcataaatgagaaattgcctgtagcatctagtctacttgaaggaagtggagacataaggagagacaaaaacaggtttgtgccataaagtattttttcaaagacaccaagatgtggtaaatgaaaattattagttcacttccctgctgccatgaaactttgccttaagaaggtgctggattccaaggtttgtaaaggcatctcggtaaagactgctttttgaatgcatatgattttgcatcagctagactgagttgattctgaccagacttgatggttttaagtcggaaccgataaattttaaaaaggagaaaaaataatttgacctagtagtataaaacatgaggctttaatggtactttgctatgaaaagaaaacactgtattccttatgcaaaacacatgtatctttcattatttataagtggcctctcttagctcagttactcaattcatacgtagtattttttaaaataattttatatctgtgtaccaccccatatatttcatattactgtttcacatgtacagctttctacttctttgtaagaacaccaaccaaccaaggtttaagtgattaatargcttgagcaccgggtggcagatgttctatgcagtgtggttcaagtttctttgaccgcacttatatgcattgctaatatggaatttaagataccatacacagtctctcatggacctatctctattgtagaattatgacttatgtcttacttgscaaatttttctgaatgtgacctttttttgctgatttgctgggtttgggattaactagcattattttgccacctttatattgtatttataaaaaaaaaagtactatcaatcaatcatactactttggattgttgtgctggtgtaatgtggatttaacatcaataaatatttgacaaat

SEQ ID NO: 52 - DNA, 4857 bp, Homo sapiens
ggctgaggcgggagcaggcggctggccggcagcagttactcggggtttccggtgcgaggccagaggtggggaagccatcggacgtcggcggtgaggatcttctcctgacccagcatcgctcatcacaatgaagaaccaagacaaaaagaacggggctgccaaacaatccaatccaaaaagcagcccaggacaaccggaagcaggacccgagggagcccaggagcggcccagccaggcggctcctgcagtagaagcagaaggtcccggcagcagccaggctcctcggaagccggagggggctcaagccagaacggctcagtctggggcccttcgtgatgtctctgaggagctgagccgccaactggaagacatactgagcacatactgtgtggacaataaccaggggggccccggcgaggatggggcacagggtgagccggctgaacccgaagatgcagagaagtcccggacctatgtggcaaggaatggggagcctgaaccaactccagtagtcaatggagagaaggaaccctccaagggggatccaaacacagaagagatccggcagagtgacgaggtcggagaccgagaccatcgaaggccacaggagaagaaaaaagccaagggtttggggaaggagatcacgttgctgatgcagacattgaatactctgagtaccccagaggagaagctggctgctctgtgcaagaagtatgctgaactgctggaggagcaccggaattcacagaagcagatgaagctcctacagaaaaagcagagccagctggtgcaagagaaggaccacctgcgcggtgagcacagcaaggccgtcctggcccgcagcaagcttgagagcctatgccgtgagctgcagcggcacaaccgctccctcaaggaagaaggtgtgcagcgggcccgggaggaggaggagaagcgcaaggaggtgacctcgcacttccaggtgacactgaatgacattcagctgcagatggaacagcacaatgagcgcaactccaagctgcgccaagagaacatggagctggctgagaggctcaagaagctgattgagcagtatgagctgcgcgaggagcatatcgacaaagtcttcaaacacaaggacctacaacagcagctggtggatgccaagctccagcaggcccaggagatgctaaaggaggcagaagagcggcaccagcgggagaaggattttctcctgaaagaggcagtagagtcccagaggatgtgtgagctgatgaagcagcaagagacccacctgaagcaacagcttgccctatacacagagaagtttgaggagttccagaacacactttccaaaagcagcgaggtattcaccacattcaagcaggagatggaaaagatgactaagaagatcaagaagctggagaaagaaaccaccatgtaccggtcccggtgggagagcagcaacaaggccctgcttgagatggctgaggagaaaacagtccgggataaagaactggagggcctgcaggtaaaaatccaacggctggagaagctgtgccgggcactgcagacagagcgcaatgacctgaacaagagggtacaggacctgagtgctggtggccagggctccctcactgacagtggccctgagaggaggccagaggggcctggggctcaagcacccagstcccccagggtcacagaagcgccttgctacccaggagcaccgagcacagaagcatcaggccagactgggcctcaagagcccacctccgccagggcctagagagcctggtgttgggtcatgctgggaagggagcggcagcccagccaggcctggcccataaaaggctcccatgctgagcagcccattgctgaagccaggatgttctgacctggctggcatctggcacttgcaattttggattttgtgggtcagttttacgtacatagggcattttgcaaggccttgcaaatgcatttatacctgtaagtgtacagtgggcttgcattggggatgggggtgtgtacagatgaagtcagtggcttgtctgtgagctgaagagtcttgagaggggctgtcatctgtagctgccatcacagtgagttggcagaagtgacttgagcatttctctgtctgatttgaggctcagacccctccctgcccttcagagctcaagacaagtaatacacccaggtcttgactgcatttgtcttgtgagcagggcttgcttggtcagctcaggccctcctagctgctctggaggctcctttgattctctagacctggaaaaggtgtccctaggcagagccctggcagggcgctcagagctggggatttcctgcctggaacaagggacctggagaatgtttttgcgtgggatgatgtgctggtcaggagccccttgggcatcgcttcccctgccctttggtagtgccaggaccaggccaatgatgcttctcagtagccttatcattcacaggtgcctctctagcctgcacaaatgattgacaagagatcacccaaaggattatttctgaaggtgtttttttctttatttctttttctttttttttttttttctttttcttttttttttgcacatgacagtgtttgtattgaggaccttccaaggaaragggatgctgtagcagtggtgcctgggtgcctggcctccagtgtcccacctccttcaccaccccacttggctcctttgccatcttgatgctgaggtttcctgtttggtgagatcaggttgtttgtggtaaaagaaaggaaagggcttctgatggctttgccacaagcttacctgtgggtttcagtcctgagaggccaccaccagttcccatcagcactgtctccatgcagcagttgctgggtcccatgtccagctgcctctttggcttcatgggtttttctgcttcctgcccccacccccacatgtgcaatcctcaagatttgtcctgattctatttcctggcacctccctgcctgtccttggggattctacttcttcctgtgtgggagcccatagctgttgtctaacaggtaagaaatgaaattgaactattgactgggccccagaaatccataaaatggctgcagacagttgtttctgtgtcctgttctacccccactccagtacataactactatgtactgtgtagagccattctatatgctgaatgttctgctgttgcaaacttgccagggtattagccagtgtttgtgccaagcagttttctgggacaacagaatgactcagaccaagatggataggatggttagggctttgcttcttgctgtttttctttgaagctagttcattgtcctgcaggtmccttcatcttccatacctagcccactcttttagcccttaccttaaatctctcagataagttggttcacaaagaatgttaagtactgaatcatgtgtgactgagaccagagatggcaaatgaatggcacaccatttctccttctcctgccccagggcaggtaccactgatctgcatcagagttgcctgctattctctggtgtatccttcacatctaggtgccctcaagcagctgtgtgagtgttgagatctctgccatctctggctgagatactgctgtcctgtgaagtgtttcccatgacctttttcttcccctttgaatccctctgtctggagtagtccttgcctcttcctgctccagtagggccttttccctaccccagcccctgtgccaggctaagctggtacaagagctgccaacctcacagagtgtttgctaggcgagagaggtgcagggaagaggcagaggtatgcaccttcccccttgaagagaggggaaaggcctacagtggcccacataattgcctgactcacacttcagctacctcttaatgcctgtggaggractggagctgctggatcccagtgtggtggtgtaggaggccacagtgagcaggtggccccagctgggtttcccaggtcaggaatrtgggccccaggcaaggtgcagcctttgctcacagctccatccatgtctagaccttcaggccagtctgcagatgaggttccctacctttttcttctcttcattgaccaaatcaaccaatcactacagctgctctgcttctgctttccaaagtagcccaggtcctgggccagatgcaggggaggtgcctatccatgagtgaaggccagtgtcttcctcacctgggtgggtcccacacttgtgacctcagttttaggaccaagatctgtgttggtttcttagattgctagcttttcctccaggggaccacagcaggtgaagctcaagagcgcatggctctgctaatagtaaattgttttcagggccttgtccagctgagagcttcatgtccaccagattctgagaggtgtcagcagcactttttttttttatttgttgtttgttttccatgaggttatyggaccatgggctgagctcaggcactttctgtaggagactgttatttctgtaaagatggttatttaaccctcctccaccccatcacggtggccctgagggctgacccggaggccagtggagctgccwggtgtccacgggggagggccaaggcctgctgagctgattctccagctgctgccccakcctttccgccttgcacagcacagaggtggtcaccccagggacagccaggcacctgctcctcttgcccttcctgggggaagggagckgccttctgtccctgtaactgctttccttatggcccagcccggccactcagacttgtttgaagctgcactggcagcttttttgtctcctttgggtattcacaacagccagggacttgattttgatgtattttaaaccacattaaataaagagtctgttgcctt

SEQ ID NO: 53 - DNA, 5015 bp, Homo sapiens
ggttgtgccgggaagtggctccagggagaagaggcctcttccctcacccgctgtgggagctgcgccccgaaagcctgccccggcacgtcgggctctcctgacccgccaagaccagagagccgttggcgccctccgcccgggcctgccggtccgtttattttaagaagctttgtgcgcctgctgtggggatttctgatccaggytgcgaagaatttcgaagtctggaaaatagcaactgtgtttgtttctaaaggatcttctcctgacccagcatcgctcatcacaatgaagaaccaagacaaaaagaacggggctgccaaacaatccaatccaaaaagcagcccaggacaaccggaagcaggacccgagggagcccaggagcggcccagccaggcggctcctgcagtagaagcagaaggtcccggcagcagccaggctcctcggaagccggagggggctcaagccagaacggctcagtctggggcccttcgtgatgtctctgaggagctgagccgccaactggaagacatactgagcacatactgtgtggacaataaccaggggggccccggcgaggatggggcacagggtgagccggctgaacccgaagatgcagagaagtcccggacctatgtggcaaggaatggggagcctgaaccaactccagtagtcaatggagagaaggaaccctccaagggggatccaaacacagaagagatccggcagagtgacgaggtcggagaccgagaccatcgaaggccacaggagaagaaaaaagccaagggtttggggaaggagatcacgttgctgatgcagacattgaatactctgagtaccccagaggagaagctggctgctctgtgcaagaagtatgctgaactgctggaggagcaccggaattcacagaagcagatgaagctcctacagaaaaagcagagccagctggtgcaagagaaggaccacctgcgcggtgagcacagcaaggccgtcctggcccgcagcaagcttgagagcctatgccgtgagctgcagcggcacaaccgctccctcaaggaagaaggtgtgcagcgggcccgggaggaggaggagaagcgcaaggaggtgacctcgcacttccaggtgacactgaatgacattcagctgcagatggaacagcacaatgagcgcaactccaagctgcgccaagagaacatggagctggctgagaggctcaagaagctgattgagcagtatgagctgcgcgaggagcatatcgacaaagtcttcaaacacaaggacctacaacagcagctggtggatgccaagctccagcaggcccaggagatgctaaaggaggcagaagagcggcaccagcgggagaaggattttctcctgaaagaggcagtagagtcccagaggatgtgtgagctgatgaagcagcaagagacccacctgaagcaacagcttgccctatacacagagaagtttgaggagttccagaacacactttccaaaagcagcgaggtattcaccacattcaagcaggagatggaaaagatgactaagaagatcaagaagctggagaaagaaaccaccatgtaccggtcccggtgggagagcagcaacaaggccctgcttgagatggctgaggagaaaacagtccgggataaagaactggagggcctgcaggtaaaaatccaacggctggagaagctgtgccgggcactgcagacagagcgcaatgacctgaacaagagggtacaggacctgagtgctggtggccagggctccctcactgacagtggccctgagaggaggccagaggggcctggggctcaagcacccagstcccccagggtcacagaagcgccttgctacccaggagcaccgagcacagaagcatcaggccagactgggcctcaagagcccacctccgccagggcctagagagcctggtgttgggtcatgctgggaagggagcggcagcccagccaggcctggcccataaaaggctcccatgctgagcagcccattgctgaagccaggatgttctgacctggctggcatctggcacttgcaattttggattttgtgggtcagttttacgtacatagggcattttgcaaggccttgcaaatgcatttatacctgtaagtgtacagtgggcttgcattggggatgggggtgtgtacagatgaagtcagtggcttgtctgtgagctgaagagtcttgagaggggctgtcatctgtagctgccatcacagtgagttggcagaagtgacttgagcatttctctgtctgatttgaggctcagacccctccctgcccttcagagctcaagacaagtaatacacccaggtcttgactgcatttgtcttgtgagcagggcttgcttggtcagctcaggccctcctagctgctctggaggctcctttgattctctagacctggaaaaggtgtccctaggcagagccctggcagggcgctcagagctggggatttcctgcctggaacaagggacctggagaatgtttttgcgtgggatgatgtgctggtcaggagccccttgggcatcgcttcccctgccctttggtagtgccaggaccaggccaatgatgcttctcagtagccttatcattcacaggtgcctctctagcctgcacaaatgattgacaagagatcacccaaaggattatttctgaaggtgtttttttctttatttctttttctttttttttttttttctttttcttttttttttgcacatgacagtgtttgtattgaggaccttccaaggaaragggatgctgtagcagtggtgcctgggtgcctggcctccagtgtcccacctccttcaccaccccacttggctcctttgccatcttgatgctgaggtttcctgtttggtgagatcaggttgtttgtggtaaaagaaaggaaagggcttctgatggctttgccacaagcttacctgtgggtttcagtcctgagaggccaccaccagttcccatcagcactgtctccatgcagcagttgctgggtcccatgtccagctgcctctttggcttcatgggtttttctgcttcctgcccccacccccacatgtgcaatcctcaagatttgtcctgattctatttcctggcacctccctgcctgtccttggggattctacttcttcctgtgtgggagcccatagctgttgtctaacaggtaagaaatgaaattgaactattgactgggccccagaaatccataaaatggctgcagacagttgtttctgtgtcctgttctacccccactccagtacataactactatgtactgtgtagagccattctatatgctgaatgttctgctgttgcaaacttgccagggtattagccagtgtttgtgccaagcagttttctgggacaacagaatgactcagaccaagatggataggatggttagggctttgcttcttgctgtttttctttgaagctagttcattgtcctgcaggtmccttcatcttccatacctagcccactcttttagcccttaccttaaatctctcagataagttggttcacaaagaatgttaagtactgaatcatgtgtgactgagaccagagatggcaaatgaatggcacaccatttctccttctcctgccccagggcaggtaccactgatctgcatcagagttgcctgctattctctggtgtatccttcacatctaggtgccctcaagcagctgtgtgagtgttgagatctctgccatctctggctgagatactgctgtcctgtgaagtgtttcccatgacctttttcttcccctttgaatccctctgtctggagtagtccttgcctcttcctgctccagtagggccttttccctaccccagcccctgtgccaggctaagctggtacaagagctgccaacctcacagagtgtttgctaggcgagagaggtgcagggaagaggcagaggtatgcaccttcccccttgaagagaggggaaaggcctacagtggcccacataattgcctgactcacacttcagctacctcttaatgcctgtggaggractggagctgctggatcccagtgtggtggtgtaggaggccacagtgagcaggtggccccagctgggtttcccaggtcaggaatrtgggccccaggcaaggtgcagcctttgctcacagctccatccatgtctagaccttcaggccagtctgcagatgaggttccctacctttttcttctcttcattgaccaaatcaaccaatcactacagctgctctgcttctgctttccaaagtagcccaggtcctgggccagatgcaggggaggtgcctatccatgagtgaaggccagtgtcttcctcacctgggtgggtcccacacttgtgacctcagttttaggaccaagatctgtgttggtttcttagattgctagcttttcctccaggggaccacagcaggtgaagctcaagagcgcatggctctgctaatagtaaattgttttcagggccttgtccagctgagagcttcatgtccaccagattctgagaggtgtcagcagcactttttttttttatttgttgtttgttttccatgaggttatyggaccatgggctgagctcaggcactttctgtaggagactgttatttctgtaaagatggttatttaaccctcctccaccccatcacggtggccctgagggctgacccggaggccagtggagctgccwggtgtccacgggggagggccaaggcctgctgagctgattctccagctgctgccccakcctttccgccttgcacagcacagaggtggtcaccccagggacagccaggcacctgctcctcttgcccttcctgggggaagggagckgccttctgtccctgtaactgctttccttatggcccagcccggccactcagacttgtttgaagctgcactggcagcttttttgtctcctttgggtattcacaacagccagggacttgattttgatgtattttaaaccacattaaataaagagtctgttgcctt

SEQ ID NO: 54 - DNA, 4971 bp, Homo sapiens
ccaacattatttttgtgcagatttcaattcatgctgcactcatcctgggggcaaaagttaaaggttttctaaaaagctamttagtgaatgtcttagttaatggaaaagaaaataagtcaatccttttttttctaaccttgaagttgcaaagattgacaatgaactctgtaatggtgcattctcctcttgtgtggtttttgaaagctgagttatccttcctgtaatgattctgcacctgcaaactatacgtggcttcctccaggcagtaaatctacagcccaggctccctgcatcttatggctccaatcactttggatctcatcgtcgcctgcacattgccatacacagggaaggagaagagatggagaaggcaaagactttctgaaagccgtggctaaaagctggcatgtgtcacatcagctcacattccattgtagagacggggtttcaccgtgttagccaggatggtcttgatmtcctgacctcgtgatccgcccgcctyggcytcccaaagtgctrggattacaggcgtgagccaccgctcccggcctggcaggcattcttgaggcaaacgggaaatgggtgaacgggaggaacattggcagcacttgtggtctgcaccaagaactgaatcgaatttccatgtgttattgaatgttcacaaagaccttgtacagcgagtgttactacctctggtcaatgattcawctcaaggctcagaaaagtcaagtgtcttgtccagggacacttagtcagaagtgaatccaaggtttaagctcaagtctgcctaactctgaatttcacagccttttgctacatatggcgaataatatatccctgagcactaaaggcagactccaaggatcttgtctctgcaatcatcattctggccataatttatgaaaagcaacccaaagtatgtgatgtaataaaaagtactatctatgagtttacccttccaaaaattgaactgaattctgagctctaaatttggaatcaaaagaacttttctctgcactaatcatttggaacatcacttaaagaaaacaacgaaaaactggtgtcccctgagagaaagcaatacaaaacattatgcataaagaaatccttccaaaaaataaaccaaatccagtcaaatctctagttttgactcctagcttaccggaaatacgtgatgggaaaaaaatgaaatgacaccactatgattcaatcagccaaatccagcatatgcaaatttctaccagataaatggtttagtttcttccccaaacaaatggcacaaggaaacggaggtaagaatgggatgctgttatagatttwaaaagatttaagaaagtataaactaaatacactatgtgcatcctctckgaacgtgcttcaaacatatcaaggggtcaatgagcagttttgaaacaataagggaatttgaacactgaatggttgtcagaagatastaagagatcattattaattttactagacataatgatgttctgattttgttttttttwwwaaaaaaaacagtgttatttcctttatagatacatcatatagtattaactaatgaaatgctttgatatctggaacgtttaaaaaatattcccgatggagtaagtgcaaagaaacaggtaagcaaaatgctgataattgctgaaacacaggatgtgtacctggggcttcatttactatctcttcattttctattttgatatttgttggacattctcataaaaaggaaagttatgttttattttctcataagctagtaatgaaatagccctamgtaactgatattgtagagacaagaataggtgtaatagagcttaaggttttcatttaaaaaactatctgtagacttcaatggatcttaggtggcatccatgcaataacactcgtggaacatgcaggacaggtgtggagctccatcttcacacagtgacattttttatgcttctgttttccctaagagtggagtgagaggatgattattttatatcatggactycttccctgctatactttttttaattattttactttcacttctgggatacatgtgctgagcatgcaggcttgtttacataggtatacatctgccatggtggtttgctgcacctatcaacccatcatacaggttttaagccctgcatgcattaggtattcrccctaatgctctccctcgcctttccccccaccccctgatagcccccagtgagtcatattcccctccctgtgtccatgtgttctcattgttcaactcccatttatgagtgagaatatgtggtgtttagttttctgttcctgtgttagtttgctgagaatgatgttttccagcttcatccatgtccctgaaaaggacatgagctcattcttttttatggctgcatagtattccacggtgttatatgtgccacattttcttaatccagtctgtcattgatggacatttgggttgtttccaagtctttgctattgtaaatagtgctgcaataaacataygtgtgcatgtgtctttgtagtagaatgatttataatcctttgggtatatgcccagtaatgggactgatgggtcaaatggtatttctggttctagatccttgaggaattgccacactgtcttccacaatggttgaactaatttatactcccaccaacagggtaaaagcattcctatttctccacatcctctccagcatctgttgtttccaaatgttttaatgattgccattccacctggcgtgagatggtatctcattgtggttttgattttcrtttctctaatgaccagtgatgataagctttttttcatatgtttsttggccacataaatgtcttcttttgacttttatgtggaaacaaatttaactgcacagagaggtgaaaattaattaataacttttaaagtaattccctaagtttctaaggatctatatgtttccatctgactttattttatttaagctcttgattgatgctgcatttggagcaggttcatgaacatgaatagagttaatctgggacagatttccctcatttgattttttcactgtttccatcacagaacttatttcatgctcaccatgtttgcaggcattgagcttggtactggagccacagagctggatcagacagacttgtgcaaatatttcaggttttttttgtgggggggtcatatttatagataaataacagtaaagagtgacrggttcttwtgaaaatgcatacacagtgaagtagagggtgaaaaggagggatgtgttctatgaggaggaagagtgataagaaagtgtaaggggatgtgtctgtgtctagacatatgtgtgttcacgtgtgtgcgtgcttgtgtgtactgcatgtgtatatgtgtggccatgcacctgtgtgcatgttcatgtgtgtgtgtgtatgtgtctgtgttgaggactaaattaattgggcttatggaagcagggagccactgataggtttaattagagactgacatgatatgatagtttaggtggatttctctgggggctgtgttgagggacagtggggaggagagctagaaggaagaaaaggacacatgcatarcagaagcaatatctgtctatgggatggtggaaagaatcagaaaagacttaataaaacatgtgacactttaactgaatcttgaaatagacaagtgttggaggagggagttggaccagatacttcatgcaaagggaagaaaagtgcacaaacaaaatatgagaaacaaggcagacaggcatttttttwaaattttcgcacccactgatrgaccagtgatgcattcacatcgtctgcattcatgatcaacaraagtgctttcctagaacatgaacctcaacccaagtgtcgcctcaagtagtgtatgcatgaactcaagcattaaattagaattgattttttaaaaaactcacacaaacagatgtattatttaaaaatctttaaagcrggtttaaacagttttcaggattaaaagcagccactattagaaagaacaaaaatacatttgacataaatataaggagcctcaatagaacctcctgtacccagtcattgtcamtgccacatccattcattcaccagcccttatatcaatgcttgctgggctcacttaccacgatcagcacgtgcatgtccttayctgaaagcttgccactcaaatgtgctcagtcttacctgtgtggctgggagtgttggggatttaatgtcaagggaaagaatcttccatcaatgaatgatgaaagttagttttcacaacttccggtccccttggccctcatcaaagggctccaggtgaggtttgggctccttgctatcctccgagtttccacgrtagttttaagcaccattgcccgtggtaatggctgacattgatactgcactttttttttatttaagatggagttcccctctgccacccrgactggagtacagtggcgcgatcctggccatygcaacctccgcctcccagatccctcctacaacacatgagaattgtgggtgctacaattcaagatgagatttgagtggggacaaagtcaaaccatatcattagataggacactggagaaaggcaagaaagaaaagacatctgaagaatgaagggagccaaagaaatgccaacattttgctttttgaagaaaagctaaattaaagtcaaaatggatttatcaatttccttgggttcgtgaatgtacagaactttattaagactgtcatgctgtcatcatggctggatctgatacggccaccgtggaccttgaggtgacctcgggaatggagacagtgcatgggagagaatcacattggaaggggcctgggtttctgaagaccctgtaagacagatctccttgcagccctgactgcccacattagggcttttatgttagggtgaagttaccttgcattgtcatataagcaattgctatttgtggtgtcttgcaaataaacctattctgatck

SEQ ID NO: 55 - DNA, 2748 bp, Homo sapiens
atctccsgcggcggggcttggagcgcgcgcwtttcgtggggcgggagcccgcgcccgggtgctgacctcctgcctcagcgccccctcccccactacccgcggcctagcggggtagcctcgggtggccaggcttgtttcctcctcggtgggtgtaaggtgcggcttcgctggtcctggcctgaatccagcggaagcgcacgctgctgagctgtcagcggaggaaaatggggcctggacctggagatatgagggtctggagagaggggccccttccctggtgtcgtgtggtgcgaccactggagagggagtttctcgccctcgtcgcgcctgccgcgcggagagataaggtgcggaccgcagatgtggabttcgtatttggctttagtcttaggcagccttaaaatctctccgtgccgtgaacctacgctagacttttctttagtgagacctgtgagtccctggaccgctctaccttctacgatatttaccagctgataacttttccttctctatttatytcgtagtggaccgtttaaacctcttatactcttaaagttatgatctctcctctcccaagcttgagtgaattccccccaaaattttggaactggtaacataaaatgttatggtgattcagttgccagctaaaaagtaagcctttaatttgtcattagccgataacctctcccttgattacccagagtatggtccagattttcacgctgcagaccctaatctctcctcaccgacagatggcacttcacagaacagaaaggccaatttgcagaactggcttcccatttcccacctgcaaactgggtcaattgtgtattcctttctcatttcactagaggtcctcccttcggtttgaggaaatcctttactattgacctggtcaaccttctctgttacccggaagctgtcttcccttctcccccttttgacctttttaaacttttctcttggtttccccgctgacagaaagataacaaccctctcaatatcgtgccctcttagagactcatgtctctcggcttccttgcacagccaagacctgaaaytgaaattatccttactatctcaattcttkgtcacattctctttccccatccccactcttcaagctacctctgtcaggctgctaccaccaaaacttttctggcagatgtcaccaagaacctcctaactggcaaagtcaggaagcactttacagttctcactttatttgacctctgaggcattcgacatttgatcatgtttccttcctgacattctctctacccttgacttctataccactctcacttgtttcttttcctatttgtgtaactgttcctctccagtctcagtagatttttcttccttagcccctttttatgtgttgatatttgctgtgattcttgtttgcttctaattttgttcaacttctctaggtaatctgactccatggctcaaagcctctgaagtctgaatctttagttcagacagctctctaagctaaactttctactaaatattcccactgggataactctcagacaccagtatgttcaaaattgatgaaatcactatacactctagacctgctctttctcttctgttgtcctgagtaatggtggctgtttaaccacaaagtctgtaatctgggagcctgttcttgatttccttttctcacacccttacagactcataattttgcctcttaactatccatcaactcacccttctgtcctaattctatcacctgagctataccaacagtctcctaaattatttgctagacacatggctatttggatttaaattaatacaattttaaatttagtgyctcaatacactagccacattttaagttctcartagccacatgtgactagtggctgtcatatgggaaagcacagattattgaacatttgtgtcattgcaagaagttgtttttttctttccctgatacggagtcttgctctgtggcctaggatggagtgcagtggcgcagtcttggcttactgcaacctctgcctcccgggttcaagcaattctgcctcagcctcccgagtagctgggattacaggcgcctgccaccacacccggctagtgtctgtatttttagtagacacggggtttcaccatgttggccaaattagtctcgaattcctgacctcgtgatccgcccgcctyrgcctcccaaagtgctgggattacaggcgtgagccactgcgcgcggcctcattacaagaagttctgttggacagtgctgctttagactttcctctctgcctctgccacaatactgccaggagagagctttccaaaatatagccctggccatagctctttttaaaactctgtgttattccttattggctatgtgataaagtccaaattcctatgtttgccaaaacagtctgcctagctttccagcctcatgtctaaccacttcctcttgggccctatattccagctgtattgaactgtttcccagacacatcattttgtttcatgcctctgtgttttacacatgtgcactttctatatggagtagacttttccccaatctatgtacgcccaaataacatctctgaaaagcttaatgttactgttcaagttgagctaactgctcattctttggtgtcccttccccttatgattttactttccacagtgaatggcatttattttctacattcataaaattagatttcagtgagagttttttgaaaataaagttgacttttttttattccatcc

SEQ ID NO: 56 - DNA, 2101 bp, Homo sapiens
cccggcggtctttgctgccgcccgggggcgcagaggccgggccttttctttcagcacaaacgtcagtttgtaaaagggaggtgctggagtctgaggagttttcaggcttccgtctcgaaggaagtctggcaggctcggaattgtcatcttcctcaggcaaatagtttttcaccttagagccagcaaggccaaaccgcccagtcacccgacttcccacagtctcagcaggtacacagggcggrgagcctcgggagcggctcccttagcaggacctgagggtttcgggagagtcctggctttgcacttagttttcccgctgcctggctgcctccgtggcggttgtgctgctttttatgcaggatgtaggatcgaaggcaaatcatcctttccctacgtcccctgccaacccctgccgctctcctctattttgtacactttatcattaaaggatttgaaatgaatggaggaataagtttttttcatctgtaayttggaagccaagtcagtaacaaaatgaaaccagtaaagcatctgttgaccaccagtaacaaatcggcaaatgttccagcattaactactaaaaaaggactacataatttaccattatcacctgagctaaaggaaaaacataatgcaaaattaattcatgataaaattgaaccaatggtcctaagatctccaccaacaggagaatccattttacggtatgctttgcccattccatcgagtaagacaaagaacttactaccagaagatgaaatgatcggaaaaattatcaaacatctgaagatggttgtttccactttggaagaaacctatggacattgygatcagaatggagaagaaccatttgtaaagcatgaacatgaagaattatctttatctgttggggatgatatgaattcattcttgacatattgttcgcaatttgcagctcagctagaagaagcacttaaagaagaacaaaatattttggaatctctttttaagtggtttcagtggcaggtcaatcagatggaagaaataagtaaagatcaaactcttttacaagcagagcctccaaaacctgacaaaacagtcattttaaatattgcagaaatagtaaggcttgtacaaagatttgaagaactgaagaatcgccttaaacagaggtctaaatcctccgtgaaagtcatgttgtctaaaactatggataaagaaaatcgaccagaagcagtgaaaagttgtgaagctctggcacagaaaattgaagaattcttagaagcccactcaactgatgaatttaaagatgtttctgcaacagaaccacaaactgctcattcaatgactaatcgatttaatgccatgttgaaagtatttgaaaaccaggcaaatatgttggagagagctgtaaatgatcaagttttgttagatgctgaatacaaacagatgcagtgtgattttcagttgttatcagaagagaagttggtgctggaaaatgaactacaaaagttgaaggacaaagagaaaactaagcctacaaataatcgaacaaagaaagctgtgaaaacagtgaagaaaaaagacaaaggaaaatctgaggattcagaaaagaagatgtctccagaaaaagagtttaaaataaaagaagatttggatcaagtacagaaagtagcacgtctggaaattgagaacaaagtccttcaggagcaattgaaacaggctttacaggaagctgaaaaagctaagcatcaacttaactatttcctaaatcaagagaagttacttaaaagtgaggggaaaactgagacaacaatgcaagtgggtaatagtcaaacaaaagttaaaggtgaagattcaaaaaatataccattggagamagaaacaagaaaatcactggtttcagattcaggtggacaaaggacaagtgataaaatccaagaatatccacagatcactgcccaaagcggaagactgattgaaaagagatgctaatagagtttctgaaatactttggaaaagtctcccaaaccttcagagagtggatgggagcgaagtaaggagaccccacctgagcagatacatggtattgcttacaataaagtacatttttgctctttac

SEQ ID NO: 57 - DNA, 2047 bp, Homo sapiens
gacagctgtgtctcgatggagtagactctcagaacagcgcagtttgccctccgctcacgcagagcctctccgtggcttccgcaccttgagcattaggccagttctcctcttctctctaatcratccgtcacctctcctgtcatccgtttccatgccgtgaggtccattcacagaacacatccatggctctcatgctcagtttggttctgagtctcctcaagctgggatcagggcagtggcaggtgtttgggccagacaagcctgtccaggccttggtgggggaggacgcagcattctcctgtttcctgtctcctaagaccaatgcagaggccatggaagtgcggttcttcaggggccagttctctagcgtggtccacctrtacagggacgrgaaggaccagccatttatgcagatgccacagtatcaaggcaggacaaaactggtgaaggattctattgcggaggggcgcatctctctgaggctggaaaacattactgtgttggatgctggcctctatgggtgcaggattagttcccagtcttactaccagaaggccatctgggagctacaggtgtcagcactgggctcagttcctctcatttccatcacgggatatgttgatagagacatccagctactctgtcagtcctcgggctggttcccccggcccacagcgaagtggaaaggtccacaaggacaggatttgtccacagactccaggacaaacagagacatgcatggcctgtttgatgtggagatctctctgaccgtccaagagaacgccgggagcatatcctgttccatgcggcatgctcatctgagccgagaggtggaatccagggtacagataggagatacctttttcgagcctatatcgtggcacctggctaccaaagtactgggaatactctgctgtggcctattttttggcattgttggactgaagattttcttctccaaattccagtggaaaatccaggcggaactggactggagaagaaagcacggacaggcagaattgagagacgcccggaaacacgcagtggaggtgactctggatccagagacggctcacccgaagctctgcgtttctgatctgaaaactgtaacccatagaaaagctccccaggaggtgcctcactctgagaagagatttacaaggaagagtgtggtggcttctcagagtttccaagcagggaaacattactgggaggtggacggaggacacaataaaaggtggcgcgtgggagtgtgccgggatgatgtggacaggaggaaggagtacgtgactttgtctcccgatcatgggtactgggtcctcagactgaatggagaacatttgtatttcacattaaatccccgttttatcagcgtcttccccaggaccccacctacaaaaataggggtcttcctggactatgagtgtgggaccatctccttcttcaacataaatgaccagtcccttatttataccctgacatgtcggtttgaaggcttattgaggccctacattgagtatccgtcctataatgagcaaaatggaactcccatagtcatctgcccagtcacccaggaatcagagaaagaggcctcttggcaaagggcctctgcaatcccagagacaagcaacagtgagtcctcctcacaggcaaccacgcccttcctccccaggggtgaaatgtaggatgaatcacatcccacattcttctttagggatattaaggtctctctcccagatccaaagtcccgcagcagccggccaaggtggcttccagatgaagggggactggcctgtccacatgggagtcaggtgtcatggctgccctgagctgggagggaagaaggctgacattacatttagtttgctctcactccatctggctaagtgatcttgaaataccacctctcaggtgaagaaccgtcaggaattcccatctcacaggctgtggtgtagattaagtagacaaggaatgtgaataatgcttagatcttattgatgacagagtgtatcctaatggtttgttcattatattacactttcagtaa

SEQ ID NO: 58 - DNA, 2177 bp, Homo sapiens
gacagctgtgtctcgatggagtagactctcagaacagcgcagtttgccctccgctcacgcagagcctctccgtggcttccgcaccttgagcattaggccagttctcctcttctctctaatccatccgtcacctctcctgtcatccgtttccatgccgtgaggtccattcacagaacacatccatggctctcatgctcagtttggttckgagtctcctcaagctgggatcagggcagtggcaggtgtttgggccagacaagcctgtccaggccttggtgggggaggargcagcattctcctgtttcctgtctcctaagaccaatgcagaggccatggaagtgcggttcttcaggggccayttctctagcgtggtccacctctacagggacgggaaggaccagccatttatgcagatgccacagtatcaaggcaggacaaaactggtgaaggattctattgcggaggggcgcatctctctgaggctggaaaacattactgtgttggatgctggcctctatgggtgcaggattagttcccagtcttactaccagaaggccatctgggagctacaggtgtcarcactgggctcagttcctctcatttccatcacgggatatgttgatagagacatccagctactctgtcagtcctcgggctggttcccccggcccacagcgaagtggaaaggtccacaaggacaggatttgtccacagactccaggacaaacagagacatgcatggcctgtttgatgtggagatctctctgaccgtccaagagaacgccgggagcatatcctgttccatgcggcatgctcatctgagccgagaggtggaarccagggtacarataggagatacctttttcgagcctatatcgtggcacctggctaccaaagtactgggaatactctgctgtggcctattttttggcattgttggactgaagattttcttctccaaattccagtgtaagcgagagagagaagcatgggccggtgccttattcatggttccagcagggacaggatcagagatgctcccacatccagctgcttctcttcttctagtcctagcctccaggggcccaggcccaaaaaaggaaaatccaggcggaactggactggagaagaaagcacggacaggcagaattgagagacgcccggaaacacgcagtggaggtgactctggatccagagacggctcacccgaagstktgcgtttctgatctgaaaactgtaacccatagaaaagctccccmggaggtgcctcactctgagaagagatttacaaggaagagtgtggtggcttctcagagtttccaagcagggaaacattactgggaggtggacggaggacacaataaaaggtggcgcgtgggagtgtgccgggatgatgtggacaggaggaaggagtacgtgactttgtctcccgatcatgggtactgggtcctcagactgaatggagaacatttgtatttcacattaaatccccgttttatcagcgtcttccccaggaccccacctacaaaaataggggtcttcctggactatgagtgtgggaccatctccttyttcaacataaatgaccagtcccttatttataccctgacatgtcggtttgaaggcttattgaggccctacattgagtatccgtcctataatgagcaaaatggaactcccatagtcatctgcccagtcacccaggaatcagagaaagaggcctcttggcaaagggcctctgcaatcccagagacaagcaacagtgagtcctcctcacaggcaaccacgcccttcctccccaggggtgaaatgtaggatgaatcacatcccacattcttctttagggatattaaggtctctctcccagatccaaagtcccgcagcagccggccaaggtggcttccagatgaagggggactggcctgtccacatgggagtcaggtgtcatggctgccctgagctgggagggaagaaggctgacattacatttagtttgctctcactccatctggctaagtgatcttgaaataccacctctcaggtgaagaaccgtcaggaattcccatctcacaggctgtggtgtagattaagtagacaaggaatgtgaataatgcttagatcttattgatgacagagtgtatcctaatggtttgttcattatattacactttcagtaa

SEQ ID NO: 59 - DNA, 1485 bp, Homo sapiens
  misc_feature (1)...(1485): n = A,T,C or G, or insertion/deletion polymorphism (see Tables 1-2)
gtgtggaggggtggacgatgttatttgaaaagttacaggacagattttctgtgttaatggacatgagccatacattgagagggctgctggctactgaaagaaatataaaattttaaaatttctgaaatcatgcagttaanatctgcacacttcactatattttaagtttttgttaatataaaagaataagwaaacagaaaagtattactgttaaacaataatagagaaangtatactttatttanaaatttctccctctagctgatcatacagttgaccagttcagggtgcccgctgctggttggatgccaggcggaatgtcagggtgttctctggtgtctgttgtggctgtgggatccacggttactgggcggagccctgtggtggctgtggtgccatggaggggctgcgatcttctgtggagctggaccctgagctgactccagggaagctggatgaggagatggtggggctgccaccccatgacgcgagtcctcaagtcactttccacagcctcgatgggaagacagtggtgtgtccacacttcatgggcttactgctgggtctcttacttttattgactttgtctgttaggaaccaactctgtgtaagaggtgaaaggcagcttgcagaaacactgcattcacaggtgaaggagaaatcccagctcattggcaagaaaacagattgtagagactgaggcatctttaaaagatgtcagggtacagaaaaagtctttcaacacccccggctttgtagatgcctacaagaaggtgaatagcaccaacgagatgctgatggagaaatttaccaccctcgttcaagaactgaaagaagagacatcctccagactctccaggcaacaagaggagctggtagagatgctaacaacgctggaggccctgggagaggccatgagagccaccccgtcacaaggagcttttccacacctgccatgcagctgagagccaagccctgctgctctctcccccacgagggggctgggtcttagagcagcactgttcttttcccctccacccaggcctcccgagctgccaggctctgtgctcccacactgactccatctgaggggtccttgaggccagtggatctggagtaccccgcccctggcctggagttcctcctccttctcacgctgacactgcagccagctcctcaatgggcggtgcctccaaatctaaagaatatggaggtcctggagcacaccaagaaatgagggactttttctttgcagaaagtttgaattctgtcttaatgagacagaatgccatacttgagcacctcatcttttgctcaaattgaaatgtcatcgaactgtatttctcaagtcaawggtctgtaaatatgatttatgtattaatctcctaagtgaacaatttatattttatcctctacataattatcgtattatgctttaaatatatatttagtttatcaataaagacattcagtactcaatagcaa

SEQ ID NO: 60 - DNA, 591 bp, Homo sapiens
atgaatgatcgtgaatyggggagccctcagaatcacagcagtttcagagatactccaggggtgccttgtgatcagaacgaatttatagacaaaaaaggttctacccrtcacctacagataatggtgagtaaatacaagaacaatgttctgctgaaaggattagaarccatcaatgactatcacttcagcataattaattccttactgatcaatgatttaaaacttaattcaacaaggagagacgaatatgacaaaattcagattgccgacttgatggaagaaaagttcccaggtgatgctggtttkggcaaactgagaactcttcaaagaaataccaacactgggagaggagaccttgctgaaactcttagaaaagtcaaaagatcatctgctctgggtttagatgtcctccttttttctttattggttgtgaataaaattaaatccattccagcaaaaggaaaaacctcatcaaagaagaggaagcagagaaaagtaggtccaactacacctttagcaaccacagacaagaagttcacagctgaagraggagaggagactcctatagctcagcgttttcacacaccatag

SEQ ID NO: 61 - DNA, 4972 bp, Homo sapiens
ccaacattatttttgtgcagatttcaattcatgctgcactcatcctgggggcaaaagttaaaggttttctaaaaagctamttagtgaatgtcttagttaatggaaaagaaaataagtcaatccttttttttctaaccttgaagttgcaaagattgacaatgaactctgtaatggtgcattctcctcttgtgtggtttttgaaagctgagttatccttcctgtaatgattctgcacctgcaaactatacgtggcttcctccaggcagtaaatctacagcccaggctccctgcatcttatggctccaatcactttggatctcatcgtcgcctgcacattgccatacacagggaaggagaagagatggagaaggcaaagactttctgaaagccgtggctaaaagctggcatgtgtcacatcagctcacattccattgtagagacggggtttcaccgtgttagccaggatggtcttgatmtcctgacctcgtgatccgcccgcctyggcytcccaaagtgctrggattacaggcgtgagccaccgctcccggcctggcaggcattcttgaggcaaacgggaaatgggtgaacgggaggaacattggcagcacttgtggtctgcaccaagaactgaatcgaatttccatgtgttattgaatgttcacaaagaccttgtacagcgagtgttactacctctggtcaatgattcawctcaaggctcagaaaagtcaagtgtcttgtccagggacacttagtcagaagtgaatccaaggtttaagctcaagtctgcctaactctgaatttcacagccttttgctacatatggcgaataatatatccctgagcactaaaggcagactccaaggatcttgtctctgcaatcatcattctggccataatttatgaaaagcaacccaaagtatgtgatgtaataaaaagtactatctatgagtttacccttccaaaaattgaactgaattctgagctctaaatttggaatcaaaagaacttttctctgcactaatcatttggaacatcacttaaagaaaacaacgaaaaactggtgtcccctgagagaaagcaatacaaaacattatgcataaagaaatccttccaaaaaataaaccaaatccagtcaaatctctagttttgactcctagcttaccggaaatacgtgatgggaaaaaaatgaaatgacaccactatgattcaatcagccaaatccagcatatgcaaatttctaccagataaatggtttagtttcttccccaaacaaatggcacaaggaaacggaggtaagaatgggatgctgttatagatttwaaaagatttaagaaagtataaactaaatacactatgtgcatcctctckgaacgtgcttcaaacatatcaaggggtcaatgagcagttttgaaacaataagggaatttgaacactgaatggttgtcagaagatastaagagatcattattaattttactagacataatgatgttctgattttgttttttttwwwaaaaaaaacagtgttatttcctttatagatacatcatatagtattaactaatgaaatgctttgatatctggaacgtttaaaaaatattcccgatggagtaagtgcaaagaaacaggtaagcaaaatgctgataattgctgaaacacaggatgtgtacctggggcttcatttactatctcttcattttctattttgatatttgttggacattctcataaaaaggaaagttatgttttattttctcataagctagtaatgaaatagccctamgtaactgatattgtagagacaagaataggtgtaatagagcttaaggttttcatttaaaaaactatctgtagacttcaatggatcttaggtggcatccatgcaataacactcgtggaacatgcaggacaggtgtggagctccatcttcacacagtgacattttttatgcttctgttttccctaagagtggagtgagaggatgattattttatatcatggactycttccctgctatactttttttaattattttactttcacttctgggatacatgtgctgagcatgcaggcttgtttacataggtatacatctgccatggtggtttgctgcacctatcaacccatcatacaggttttaagccctgcatgcattaggtattcrccctaatgctctccctcgcctttccccccaccccctgatagcccccagtgagtcatattcccctccctgtgtccatgtgttctcattgttcaactcccatttatgagtgagaatatgtggtgtttagttttctgttcctgtgttagtttgctgagaatgatgttttccagcttcatccatgtccctgaaaaggacatgagctcattcttttttatggctgcatagtattccacggtgttatatgtgccacattttcttaatccagtctgtcattgatggacatttgggttgtttccaagtctttgctattgtaaatagtgctgcaataaacataygtgtgcatgtgtctttgtagtagaatgatttataatcctttgggtatatgcccagtaatgggactgatgggtcaaatggtatttctggttctagatccttgaggaattgccacactgtcttccacaatggttgaactaatttatactcccaccaacagggtaaaagcattcctatttctccacatcctctccagcatctgttgtttccaaatgttttaatgattgccattccacctggcgtgagatggtatctcattgtggttttgattttcrtttctctaatgaccagtgatgataagctttttttcatatgtttsttggccacataaatgtcttcttttgacttttatgtggaaacaaatttaactgcacagagaggtgaaaattaattaataacttttaaagtaattccctaagtttctaaggatctatatgtttccatctgactttattttatttaagctcttgattgatgctgcatttggagcaggttcatgaacatgaatagagttaatctgggacagatttccctcatttgattttttcactgtttccatcacagaacttatttcatgctcaccatgtttgcaggcattgagcttggtactggagccacagagctggatcagacagacttgtgcaaatatttcaggttttttttgtgggggggtcatatttatagataaataacagtaaagagtgacrggttcttwtgaaaatgcatacacagtgaagtagagggtgaaaaggagggatgtgttctatgaggaggaagagtgataagaaagtgtaaggggatgtgtctgtgtctagacatatgtgtgttcacgtgtgtgcgtgcttgtgtgtactgcatgtgtatatgtgtggccatgcacctgtgtgcatgttcatgtgtgtgtgtgtatgtgtctgtgttgaggactaaattaattgggcttatggaagcagggagccactgataggtttaattagagactgacatgatatgatagtttaggtggatttctctgggggctgtgttgagggacagtggggaggagagctagaaggaagaaaaggacacatgcatarcagaagcaatatctgtctatgggatggtggaaagaatcagaaaagacttaataaaacatgtgacactttaactgaatcttgaaatagacaagtgttggaggagggagttggaccagatacttcatgcaaagggaagaaaagtgcacaaacaaaatatgagaaacaaggcagacaggcatttttttwaaattttcgcacccactgatrgaccagtgatgcattcacatcgtctgcattcatgatcaacaraagtgctttcctagaacatgaacctcaacccaagtgtcgcctcaagtagtgtatgcatgaactcaagcattaaattagaattgattttttaaaaaactcacacaaacagatgtattatttaaaaatctttaaagcrggtttaaacagttttcaggattaaaagcagccactattagaaagaacaaaaatacatttgacataaatataaggagcctcaatagaacctcctgtacccagtcattgtcamtgccacatccattcattcaccagcccttatatcaatgcttgctgggctcacttaccacgatcagcacgtgcatgtccttayctgaaagcttgccactcaaatgtgctcagtcttacctgtgtggctgggagtgttggggatttaatgtcaagggaaagaatcttccatcaatgaatgatgaaagttagttttcacaacttccggtccccttggccctcatcaaagggctccaggtgaggtttgggctccttgctatcctccgagtttccacgrtagttttaagcaccattgcccgtggtaatggctgacattgatactgcactttttttttatttaagatggagttcccctctgccacccrgactggagtacagtggcgcgatcctggccatygcaacctccgcctcccagatccctcctacaacacatgagaattgtgggtgctacaattcaagatgagatttgagtggggacaaagtcaaaccatatcattagataggacactggagaaaggcaagaaagaaaagacatctgaagaatgaagggagccaaagaaatgccaacattttgctttttgaagaaaagctaaattaaagtcaaaatggatttatcaatttccttgggttcgtgaatgtacagaactttattaagactgtcatgctgtcatcatggctggatctgatacggccaccgtggaccttgaggtgacctcgggaatggagacagtgcatgggagagaatcacattggaaggggcctgggtttctgaagaccctgtaagacagatctccttgcagccctgactgcccacattagggcttttatgttagggtgaagttaccttgcattgtcatataagcaattgctatttgtggtgtcttgcaaataaacctattctgatctk

SEQ ID NO: 62 - DNA, 2215 bp, Homo sapiens
  misc_feature (1)...(2215): n = A,T,C or G, or insertion/deletion polymorphism (see Tables 1-2)
tgggcttctctttcgtccgctcaggcctcacttttctccgtaaacaccccggcacgatggagcggccccagcgttcgggagcggcccgggagcggaaagcggcagtgtcctgggagcctcgaaagccgcaggggsggcagctcgcctcggaatgacctctgwcggaagaaataaaacggggcmtgggacgcttgcacgaaagaacccgmcaaaaaccagagcccgcactcactctcrtactggggaggtggacttcagggagggttatctggaggaggaatctctcaaagtacaacacaggagaaagamagtatcgcaatacagaaattttatttttwattttattattattttcctgagamcggagtctcgctctgtcgcccaggctggagtgcagtggcgcgatctcggctcactgyaaactccgcctcccgggttcacgccattcggctgcctcaccctccacagtagctgggactacaagcgcccgccaccacgcccggctaatttgcaatacggaaattttaatarctgacgtgaaaaggggttgtctccataaaggatgcgggccttcaggggcagcattattctgcaggtctcctgcttcctgatggcacaaggactccacatcacccagtcctaccttaaatccaatcggacaccagtccacaaactggttggtgtgcttgctcttgatggtggcgacagccgcactgacatctttcaggaccacatcccctctgtacaacatgcagcagsccatgtacttgccatggtgagggtcacactwgaccatctgattggctggctcgaagygggcactggcgatcttggccacggacagctgctcatggtaggccttcttggctgagatgaccaggrcgtaggtggccagggggaggtggatgtgggggtayggcaccaagttggtttggaattctgtcaagtacacattcagggccccatcraatcacagggaggccgtgatggaggacacgatctgcccagacgactgaggttggtgtacrtgggacactcgatgtccaggttgtgctgacatgtcataggtggctttgctgtygactatgaaggcacagtcagaatgttccagggtcgtgtaggtggtcaggatggagytgtagggctccgtcatggccatggagacctggggggctgggcaaatggcaaactccagcttggacttcttcccgtagtccaccgagagccgcttcatgagcagagacacgaacccagagccagtgccgcccccaaagctgtggaagatgaggaagccctgcagtcccatgcacagatctgccygagagaaaycagacaacgtaagccaatgccygtgggagccacaccaccaacctccaccaagccggggccacttctctttgcctctgagagttgatacggattcagaccatccataatgaacacgcatcacactttgaagcagagaaaagcagacaatacagatctatgcacaaatcaccacgcayacttcacagtaagacgttgcagaggtctagnaaggctggtttgaagaaatacacagaagaaaaacggatggactaaccagagcgctcagccagcctgctggactggcacccgtggctacagacactcttgtttagcaccatggagagctccctgcacagaagcaaggactcagggcattgccccctctctacctgagaactagactcagcgcccagcactggatttgataatacaggtactcaaatacatgtgctttcctctttactcagacacttctagggctggcagggtcagacagtaatcccccactttgtggggaggccctgtttttgctgaacagctcargggcrggaagattctttcttccacacacccctgcaactgccaatacttgttctgtgtgacccttgcagccatcctatgcggtaggtgctaccattgccatggatcaagtggggacgcacagatccaagctccttcacctctcaagggagtkgggccctcccacagatctcttggaggaaaaaaatggccttgctgggcctgtcgatttccagtccccacccacctccctcatgtacatgtgtctgtttgtgaaaccttcatagcaccttagcttccaggccctccatcccggctgcctctctggcacttgcccttttactgtgcgggtccaaagagacacctatgttcagtttgtcraagtctg

SEQ ID NO: 63 - DNA, 1856 bp, Homo sapiens
tgcattaaraagtcttcagcagtgatattagacattggggcatgctcttacaggcaatgggtggtgtcataaagagcatatttacattcgttttaattgtggaatttataattggaaatttaggaaatagtttcatagcactggtgaactgtattgactgggtcaagggwagaaagatctcttcggttgatcggatcctcactgctttggcaatctctcgaattagcctggtttggttaatattcggaagctggtgtgtgtctgtgtttttcccagctttatttgccactgaaaaaatgttcagaatgcttactaatatctggacagtgatcaatcattttagtgtctggttagctacaggcctcggtactttttattttctcaagatagccaatttttctaactctrtttttctctacctaaagtggagrgttaaaaaggtggttttggtgctgcttcttgtgacttcggtcttcttgtttttaaatattgcactgataaacatccatataaatgccagtatcaatggatacagaagaaacaagacttgcagttctgattcaagtaactttacaygattttccagtcttattgtattaaccagcactgtgttcattttcataccctttactttgtccctggcaatgtttcttctcytcatcttctccatgtggaaacatcgcaagaagatgcagcacactgtcaaaatatccggagacgccagcaccaaagcccacagaggagttaaaagtgtgatcactttcttcctactctatgccattttctctctgtcttttttcatatcagtttggacctctgaaaggttggaggaaaatctaattattctttcccaggtgatgggaatggcttatccttcatgtcactcatgtgttctgattcttggaaacaagaagctgagacaggcctctctgtcagtgctactgtggctgaggtacatgttcaaagatggggagccctcaggtcacaaagaatttagagaatcatcttgaatatattagaaaaaaaatagctcctaagaaattcttgtatgttatataaatttatacttccttaagattctttcattgtgtataactttgtgaattttacaaagatrtgcttggaatcaacaccatccaaacatatcacaaattaggatatatgaaagtatgtatattaccatacagagaagaatgcgaatactataaagagttcttatacaaacagataatatagattttgtatcaatcattcaccttttttgagatttttaaatgagaaaacctataatgtataaaatacatgtgtgtatgtatgtatgtgacacagttactaaaaataggcttcttaaacttacatctcaatctggtagataaagtacataaaagaatatggaattttagtacctatattaagtgtttttawtttttgtataatatttagtacctgattagcgtgtatgcaaaaaastaatttgcttcgtttgttgaattagaagccagctgccttactaaactaccacatttgctttgctcattctcttggctttgcagatagaaaattatatcatctgcatatagtgacttataatgattattttacttctccattttactacttgtaattcttttttggtatcagttgtataatgaaatggtttgaacattcaaagtgttaagtaatcctgatcgtaactgctgtctttgcaaatggagtgttttctagtgttttaacaataaacgtaatactgactctagctttgagataaattcttttaaaaatattmttcagggagaatatttgtttcctatcttcctgtgtatagtattgtaataaaatctctgttaaaaactatc

SEQ ID NO: 64 - DNA, 900 bp, Homo sapiens
atgatgtgttttctgctcatcatttcatcaattctggtagtgtttgcatttgttcttggaaatgttgccaatggcttcatagcyctagtaaatgtcattgactgggttaacacacgaaagatctcctcagctgagcaaattctcactgctctggtggtctccagaattggtttactctgggtcatgttattcctttggtatgcaactgtgtttaattctgctttatatggtttagaagtaagaattgttgcttctaatgcctgggctgtaacgaaccatttcagcatgtggcttgctgctagcctcagcatattttrtttgctcaagattgccaatttctccaaccttatttctctccacctaaagaagagaattmagagtgttgttctggtgatactgttggggcccttggtatttytgatttgtaatcttgctgtgataaccatggatgagagagtgtggacaaaagaatatgaaggaaatgtgacttggaagatcaaattgaggaatgcaatacacctttcaagcttgactgtaactactctagcaaacctcataccctttactctgagcctaatatgttttctgctgttaatctgttctctttgtaaacatctcaagaagatgcggctccatagcaaaggatctcaagatcccagcaccaaggtccatataaaagctttgcaaactgtgacctccttcctcatgttatttgccatttactttctgtgtataatcacatcaacttggaatcttaggacacagcagagcaaacttgtactcctgctttgccaaactgttgcaatcatgtatccttcattccactcattcatcctgattatgggaagtaggaagctaaaacagacctttctttcagttttgtggcagatgacaygctga

SEQ ID NO: 65 - DNA, 1381 bp, Homo sapiens
atgatgagttttctacacattgttttttccattctagtagtggttgcatttattcttggaaattttgccaatggctttatagcactgataaatttcattgcctgggtcaagagacaaaagatctcctcagctgatcaaattattgctgctctggcrgtctccagagttggtttgctctgggtaatattattacattggtattcaactgtgttgaatccaacttcatctaatttaraagtaataatttttatttctaatgcytgggcagtaaccaatcatttcagcatctggcttgctactagcctcagcatattttatttgctcaagatcgtcaatttctccagacttatttttcatcacttaaaaaggaaggctaagagtgtagttctggtgatagtgttggggtctttgttctttttggtttgtcamcttgtgatgaaamacacgtatataaatgtgtggacagaagaatgtgaaggaaacgtaacttggaagatcaaactgaggaatgcaatgcacctttccaacttgactgtagccatgctagcaaacttgataccattcactctgaccctgatatcttttctgctgttaatctactctctgtgtaaacatctgaagaagatgcagctccatggcaaaggatctcaagatcccagcaccaagatccacataaaagctctgcaaactgtgacctccttcctcrtattacttgccatttactttctgtgtctaatcatatcgttttggaattytaagatgckaccaaaagaaattgtcttaatgctttgccaagcttttggaatcatatatccatcattccactcattcattctgatttgggggaacaagacgctaaagcagacctttctttcagttttgtggcaggtgacttgctgggcaaaaggacagaaccagtcaactccatagattcacaagaggygcattgtgtgttttctagcagaaaacaaattgatggtgtctggaacattttatatttcccacaagtttttccgtagtctatgtatttgagtaatttccaaaagttgacatagaaaagtcttttacctaagtttattatataaaagtatatatatataatatacatttgcgtgtgtgtgtatgtctgaatgtatatgaaaatttaatatttaccataacatacctttaatcaacttttcatataaactgttcagttataccaaagtaggataagaaatttctcagaattatgaacccatgtgtatttcacacatttttttatatgatatttcatttgaggaatttatgatctctatttataattaagaactgacagcttatatcagaaaatcattgctgtttttcgttgtaaaatcattgctgtttttcgttgtaattt

SEQ ID NO: 66 - DNA, 903 bp, Homo sapiens
atgataacttttctacccatcattttttccattctagtagtggttacatttgttcttgggaattttgctaatggcttcatagtgttggtaaattscattgagtgggtcaagagacaaaagatctcctttgctgaccaaattctcactgctctggcrgtctccagagttggtttgctctgggtaatattattacattggtatgcaactgttttgaatccaggttcatatagtttaggagtaagaattactactattaatgcctgggctgtaaccaaccatttcagcatctgggttgctactagcctcagcatattttatttsctcaagattgccaatttctccaactttatttttcttcacttaaaaaggagaattaagagtgtcattccagtgatactattggggtctttgttatttttggtttgtcatcttgttgtggtaaacatggatgagagtatgtggacaaaagaatatgaaggaaacgtgagttgggagatcaaattgagtgatccgacgcacctttcagatatgactgtaaccacgcttgcaaacttaataccctttactctgtccctgttatcttttctgctcttaatctgttctttgtgtaaacatctcaagaagatgcagytccatggcaaaggatctccagattccaayaccaaggtccacataaaagctttgcaaacggtgacctccttcctcttgttatttgctgtttactttctgtccctaatsacatcgatttggaattttaggaggaggctgtagaacgaacctgtcctcatgctcrgccaaactactgcaattatatacccttcatttcattcattcatcctaatttggggaagcaagaagctgaaacagacctttcttttgattttgtgtcagattaagtgctga

SEQ ID NO: 67 - DNA, 828 bp, Homo sapiens
gtctccctgattgattttattctcaactgcttggccatctccaggatatgtttcctgtagataacaattttagctacctctttcaatataggctatgagaaaatgcctgattctaagaatcttgcagtaagttttgacattctctggacaggatccagctatttctgcctgtcctgtaccacttgcctcagtgtcttctatttcctcaaggtagccaacttctccaatcccattttcctctggatgaaatggaaaattcacaaggtgcttctctttattgtactagaggcaacgatctctttctgcacaacttccattctgaaggaaataataattaatagtttaatctaagaacgggtaacaataaaaggcaacttgacatttaattatatggataccatgcatgatttcacttctctgtttctccttcagatgatgttcatccttccttttgtggaaacactggcttccattcttctcttaatcctctccttatggagccacaccaggcagatgaagctacatggtatttattccagggatcccagcacagaagcccatgtaaaacctataaaagctataatttcatttctactcctctttattgtgcattatttcatcagtatcatactaacattggcctgtcctcttctagacttcgttgcggcaaggacttttagtagtgtgctggtatttttccatccatctggccattcatttcttctaattttacgggacwgcaaactgaagcaagcttctctctgtgtcctgaagaagatgaagtatgccaaaaaggacataatctctcatttttataaacatgcctga

SEQ ID NO: 68 - DNA, 906 bp, Homo sapiens
atatgtgttctgctcatcattttatcaattctggtagtgtttgcatttgttcttggaaatgttgccaatggcttcatagctctarttaatgtcaatgactgggttaagacacaaaagatctcmtcaactgaccaaattgtcactgctctggcattctccagaattggtttactttgatcatattattacattggtatgcaactgtgtttaattcagctttatatagtttagaagtaagaattgttccttctaatgtctcggcaataatcaatcatttcagcatttggcttgctacgagcctcagcatattttatttgttcaagattgccaatttctccaattttatttttctccacctaaagaagagaattaagagtgttcttcttgtgatactgttggggtccttggtatttttgatttgtaatcttgctgtggtaaccatggatgacagtgtgtggacaaaagaatttgaaggaaatgtgacttkgaagatcgaattgaggaatgcaatacacctttcaaacatgactataaccaaccatgctagcaaacttcacactgttcattctgactctaatatcttttctgctgttagtctgttctccgtgtaaacatctcaagatgatgcagctccatggcaaaggatctcaagatctcagcaccaaggtccatataaaacctttgcaaactgttatctccttccktatgttatttgccatttactttctgtgtataatcacatcaacttggaatcctaggacacagcagagcaatcttgtattcctgctttaccaaactcttgcaatcatgtatccttcattccactcattcatcctgattatgagaagtaggaagctaaaacagacctctctttcagttttgtgtcaggtgacgtgctgggtgaaa

SEQ ID NO: 69 - DNA, 900 bp, Homo sapiens
atgataacttttctatacatttttttttcaattctaataatggttttatttgttctcggaaactttgccaatggcttcatagcactggtaaatttcattgactgggtgaagagaaaaaagatctcctcagctgaccaaattctcactgctctggcggtctccagaattggtttgctctgggcattattattaaattggtatttaactgtgttgaatccagctttttatagtgtagaattaagaattacttcttataatgcctgggttgtaaccaaccatttcagcatgtggcttgctgctaacctcagcatattttatttgctcaagattgccaatttctccaaccttctttttcttcatttaaagaggagagttaggartgtcattctggtgatactgttggggactttgatatttttggtttgtcatcttcttgtggcaaacatggatgagagtatgtgggcagaagaatatgaaggaaacatgactgggaagatgaaattgaggaatacagtacatctttcatatttgactgtaactaccctatggagcttcataccctttactctgtccctgatatcttttctgatgctaatctgttctctgtrtaaacatctcaagaagatgcagctccatggagaaggatcgcaagatctcagcaccaaggtccacataaaagctttgcaaactctgatctccttcctcttgttatgtgccattttctttctattcctaatcgtttcggtttggagtcctaggaggctgcggaatgacccrgttgtcatggttagcaaggctgttggaaacatatatcttgcattcgactcattcatcctaatttggagaaccaagaagctaaaacacacctttcttttgattttgtgtcagattaggtgctga

SEQ ID NO: 70 - DNA, 930 bp, Homo sapiens
atgataacttttctgcccatcattttttccattctaatagtggttacatttgtgattggaaattttgctaatggcttcatagcattggtaaattccattgagtggktcaagagacaaaagatctcttttgctgaccaaattctcactgctctggcagtctccagagttggtttactctgggtattagtattaaattggtatgcaactgagttgaatccagcttttaacagtatagaagtaagaattactgcttacaatgtctgggcagtaatcaaccatttcagcaactggcttgctactagcctcagcatattttatttgctcaagattgccaatttctccaaccttatttttcttcacttaaagaggagagttaagagtgttgttctggtgatactattggggcctttgctatttttggtttgtcatctttttgtgataaacatgaatcagattatatggacaaaagaatatgaaggaaacatgacttggaagatcaaactgaggagtgcaatgtacctttcaaatacaacrgtaaccatcctagcaaacttagttcccttcactctgaccctgatatcttttctgctgttaatctgttctctgtgtaaacatctcaaaaagatgcagctccatggcaaaggatctcaagatcccagcatgaaggtccacataaaagctwtgcaaactgtgacctccttcctcttgttatgtgccatttactttctgtccataatcatgtcagtttrgagttttgagagtctggaaaacaaacctgtcttcatgttctgcgaagctattgcattcagctatccttcaacccacccattcatcctgatttggggaaacaagaagctaaagcagacttttctttcagttttgtggcatgtgaggtactgggtgaaaggagagaagccttcatctycatag

SEQ ID NO: 71 - DNA, 885 bp, Homo sapiens
atgatatgttttctgctcatcattttatcaattctggtagtgtttgcatttgttcttggaaatgttgccaatggcttcatagctctagtaggtgtccttgagtgggttaagacacaaaagatctcatcarctgaccaaatttctcactgctctggtggtgtccagarttggtttactctgggtcatattattacattggtatgcaactgtgtttaatttggcttcayatagattagaagtaagaatttttggttctaatgtctcagcaataaccaagcatttcagcatstgggtgttactagcctcagcatatttcatttgctcaagactgccaatttctccaaccttatttttctccacctaaagaaraggattaagaatgttggtttggtgatgctgttggggcccttggtatttttcatttgtaatcttgctctgataaccaygggtgagagtgtgtggacaaaagaatatgaaggaaatttgtcttggatgatcaaattgaggaatgcaatacagctttcaaacttgactgtaaccatgccagcaaacgtcacaccctgcactctgacactaatatcttttctgctgttaatctattctccatgtaaacatgtcaagaagatgcagctccatggcaaaggatctcaacatctcagcaccaaggtgcacataaaagctttgcaaactgtgatctccttccttatgttatttgccatttactttctgtgtctaatcacatcaacttggaatcctaggactcagcagagcaaacttgtattcctgctttaccaaactcttggattcatgtatcytttgttccactcattcatcctgactatgggaagtaggaagccaaaacagacctttctttcagctttgtga

SEQ ID NO: 72 - DNA, 930 bp, Homo sapiens
atgacaacttttatacccatcattttttccagtgtggtagtggttctatttgttattggaaattttgctaatggcttcatagcattggtaaattccattgagygggtcaagagacaaaagatctcttttgctgaccagattctcactgctctggcggtctccagagttggtttgctctgggtattattattaaattggtattcaactgtgtttaatccagctttttatagtgtagaagtaagaactactgcttataatgtctgggcagtaaccggccatttcagcaactggcttgctactagcctcagcatattttatttgctcaagattgccaatttctccaaccttatttttcttcacttaaagaggagagttaagagtgtcattctggtgatgctgttggggcctttactatttttggcytgtcaactttttgtgataaacatgaaagagattgtacggacaaaagaatatgaaggaaacwtgacttggaagatcaaattgaggagtgcagtgtacctttcagatgcgactgtaaccacgctaggaaacttagtgcccttcactctgaccctgctatgttttttgctgttaatctgttctctgtgtaaacatctcaagaagatgcagctccatggtaaaggatctsaagatcccagcaccaaggtccacataaaagytttgcaaactgtgatctttttcctcttgttatgtgccrtttactttctgtccataatgatatcagtttggagttttgggagtctggaaaacaaacctgtcttcatgttctgcaaagctattagattcagctatccttcaatccaccsattcatcctgatttggggaaacaagaagctaaagcagacttttctttcagttttgcggcaagtgaggtactgggtgaaaggagagaagccttcrtctccatag

SEQ ID NO: 73 - DNA, 860 bp, Homo sapiens
taccattcttcaagaaacggtttgaatcagacygcctttccttttgtcttcattgtcataaacatctgcccccgtgtggttctgactggccgcgaacccctacccgaagcttttattccatcattgtgcaccgttggtggggaatgctgtggcaacaggccacgcctccacttactggttggctttgcgcaggcgccaacggaagtgggtcgcaggaagaggaagtcccgcctctctctcctcaggcagcagcaacgcggaggaaacgggagtgaacggagagcgtagtgaccatcatgttttagcacaaccccctcagaccactctgtggagaacagactgtcagggaacgtgggtggaggcagagagaccagaaagattccaggacagagatgacagaggcttaggccatggagcctcctcaacaagcccaagagtgagatgaccccagaggagctgcagaagcgagaggagkaggaatttaacaccggtccactctctgtgctcacacagtcagtcaagaacaatacccaagtgctcatcaactgccgcaayaataagaaactcctgggccgcgtgaaggccttcgataggcactgcaacatggtgctggagaacgtgaaggagatgtggactgaggtacccaagrgtggcaagggcaagaagaagtccaagccagtcaacaaagaccgctacatctccaagatgttcctgcgcggggactcagtcatcgtggtcctgcggaacccgctcatcgccggcaagtaggggcmgcctgtctgttgacagaactcactcctctgtcctatgaagaccgctgccattggtgttgagaataataaagctctgtgtttttttct

SEQ ID NO: 74 - DNA, 745 bp, Homo sapiens
taccattcttcaagaaacggtttgaatcagacygcctttccttttgtcttcattgtcataaacatctgcccccgtgtggttctgactggccgcgaacccctacccgaagcttttattccatcattgtgcaccgttggtggggaatgctgtggcaacaggccacgcctccacttactggttggctttgcgcaggcgccaacggaagtgggtcgcaggaagaggaagtcccgcctctctctcctcaggcagcagcaacgcggaggaaacgggagtgaacggagagcgtagtgaccatcatgagcctcctcaacaagcccaagagtgagatgaccccagaggagctgcagaagcgagaggagkaggaatttaacaccggtccactctctgtgctcacacagtcagtcaagaacaatacccaagtgctcatcaactgccgcaayaataagaaactcctgggccgcgtgaaggccttcgataggcactgcaacatggtgctggagaacgtgaaggagatgtggactgaggtacccaagrgtggcaagggcaagaagaagtccaagccagtcaacaaagaccgctacatctccaagatgttcctgcgcggggactcagtcatcgtggtcctgcggaacccgctcatcgccggcaagtaggggcmgcctgtctgttgacagaactcactcctctgtcctatgaagaccgctgccattggtgttgagaataataaagctctgtgtttttttct

SEQ ID NO: 75 - DNA, 2024 bp, Homo sapiens
ggcagcggtggcaggggctgcaggagcaagtgaccaggagcaggactggggacaggcctgatcgcccctgcacgaaccagacccttcgccgccctcasgatgactacctctccgatcctgcagctgctgctgcggctctcactgtgcgggctgctgctccagagggcggagacaggctctaaggggcagacggcgggggagctgtaccagcgctgggaacggtaccgcagggagtsccaggagaccttggcagccgcggaaccgccttcaggcctcgcctgtaacgggtccttcgatatgtacgtctgctgggactatgctgcacccaatgccactgcccgtgcgtcctgcccctggtacctgccctggcaccaccatgtggctgcaggtttcgtcctccgccagtgtggcagtgatggccaatggggactttggagagaccatacacaatgtgagaacccagagaagaatgaggcctttctggaccaaaggctcatcttggagyggttgcaggtcatgtacactgtcggctactccctgtctctcgccacactgctgctagccctgctcatcttgagtttgttcaggcggctacattgcactagaaaytatatccacatcaacctgttcacgtctttcatgctgcgagctgcggccattctcagccgagaccgtctgctacctcgacctkgcccctaccttggggaccaggcccttgygctgtggaaccaggccctcgctgcctgccgcacggcccagatcgtgacccagtactgcgtgggtgccaactacacgtggctgctggtggagggcgtctacctgcacagtctcctggtgctcgtgggaggctccgaggagggccacttccgctactacctgctcstcggctggggggcccccgcgcttttcgtcattccctgggtgatcgtcaggtacctgtacgagaacacgcagtgctgggagcgcaacgaagtcaaggccatttggtggattatacggacccccatcctcatgaccatcttgattaatttcctcatttttatcckcattcttggcattctcctgtccaagctgaggacacggcaaatgcgctgccgggattaccggctgaggctggctcgctccacgctgacgctggtgcccctgctgggtgtccacsaggtggtgtttgctcccgtgacagaggaacaggcccggggcgccctgcgcttcgccaagctcggctttgagatcttcctcagctccttccagggcttcctggtcagcgtcctctactgcttcatcaacaaggaggtgcagtcggagatccgccgtggctggcaccactgccgcctgcgccgcagcctgggcgaggagcaacgccagctcccggagcgcgccttccgggccctgccctccggctccggcccgggcgaggtccccaccagccgcggcttgtcctcggggaccctcccagggcctgggaatgaggccagccgggagttgsaaagttactgctagggggcgggatccccgtgtctgttmagttagcatggatttattgagtgccaactgcgtgccaggcccagtacggaggacgctggggaaatggtgaaggaaacagaaaaaaggtccctgcccttctggagatgacaactgagtggggaaaacagaccgtgaacacaaaacatcaagttccacacacgctatggaatggttatgaagggaagcgagaagggggcctagggtggtctgggaggcgtctccaaggaggtgacacttaarccatccccgaaagaggtgaaagagatcactttggggagagctggagaacaggattctaggcggaagcgatagcataggcaaaggcccttgggcaggaaggcgctcagccttggctggagtagaattaagtcagagccaacaggtggggagagacagagaagtgggcaggggcacccaagttgggatttcatttcaggtgcattggagattcttaggagtgtctcytgggggtaatattttattttttaaaaaatgaggat

SEQ ID NO: 76 - DNA, 1580 bp, Homo sapiens
ggcagcggtggcaggggctgcaggagcaagtgaccaggagcaggactggggacaggcctgatcgcccctgcacgaaccagacccttcgccgccctcasgatgactacctctccgatcctgcagctgctgctgcggctctcactgtgcgggctgctgctccagagggcggagacaggctctaaggggcagacggcgggggagctgtaccagcgctgggaacggtaccgcagggagtsccaggagaccttggcagccgcggaaccgccttcaggcctcgcctgtaacgggtccttcgatatgtacgtctgctgggactatgctgcacccaatgccactgcccgtgcgtcctgcccctggtacctgccctggcaccaccatgtggctgcaggtttcgtcctccgccagtgtggcagtgatggccaatggggactttggagagaccatacacaatgtgagaacccagagaagaatgaggcctttctggaccaaaggctcatcttggagyggttgcaggtcatgtacactgtcggctactccctgtctctcgccacactgctgctagccctgctcatcttgagtttgttcaggcggctacattgcactagaaaytatatccacatcaacctgttcacgtctttcatgctgcgagctgcggccattctcagccgagaccgtctgctacctcgacctkgcccctaccttggggaccaggcccttgygctgtggaaccaggccctcgctgcctgccgcacggcccagatcgtgacccagtactgcgtgggtgccaactacacgtggctgctggtggagggcgtctacctgcacagtctcctggtgctcgtgggaggctccgaggagggccacttccgctactacctgctcstcggctggggggcccccgcgcttttcgtcattccctgggtgatcgtcaggtacctgtacgagaacacgcagtgctgggagcgcaacgaagtcaaggccatttggtggattatacggacccccatcctcatgaccatcttgattaatttcctcatttttatcckcattcttggcattctcctgtccaagctgaggacacggcaaatgcgctgccgggattaccggctgaggctggctcgctccacgctgacgctggtgcccctgctgggtgtccacsaggtggtgtttgctcccgtgacagaggaacaggcccggggcgccctgcgcttcgccaagctcggctttgagatcttcctcagctccttccagggcttcctggtcagcgtcctctactgcttcatcaacaaggaggtaggcagagacccggccgccgcccccgccctctggcggcagcgcggggtacggcgccgcctctgagcgccatcgtctcacaggtgcagtcggagatccgccgtggctggcaccactgccgcctgcgccgcagcctgggcgaggagcaacgccagctcccggagcgcgccttccgggccctgccctccggctccggcccgggcgaggtccccaccagccgcggcttgtcctcggggaccctcccagggcctgggaatgaggccagccgggagttgsaaagttactgc

SEQ ID NO: 77 - DNA, 2336 bp, Homo sapiens
atttcaggacttcgctttcgggttcccttgtcctgtgttgtgtaatgcccccgttatggcactagaaatattttttattagccgaagctaaatatagtgggactttggctgatcccgagctcggaggacagccggggtgatccgtttccccccgaggatcgaggtggtgcgctctggacggggttgtgcattctcgccgcgcccgggcggacgatccagcgaacagccccgcttctarccmgagatgctgctgccggcgcccgcgctccgccgcgccctgctgtcccgcccctggaccggggccggcctgcggtggaagcacacctcctccctgaaggtggccaacgagcccgtcttagccttcacgcagggcagccctgagcgagatgccctgcaaaaggccttgaaggacctgaagggccggatggaagccatcccatgcgtggtgggggatgaggaggtgtggacgtcggacgtgcagtaccaagtgtcgccttttaaccatggacataaggtggccaagttctgttatgcagacaagagcctgctcaacaaagccattgaggctgccctggctgcccggaaagagtgggacctgaagcctattgcagaccgggcccagatcttcctgaaggcggcagacatgctgagtgggccgcgcagggctgagatcctcgccaagaccatggtgggacagggtaagaccgtgatccaagcggagattgacgctgcagcggaactcatcgacttcttccggttcaatgccaagtatgcggtggagctggaggggcagcagcccatcagcgtgcccccgagcaccaacagcacggtgtaccggggtctggagggcttcgtggcggccatctcgccctttaacttcactgcaatcggcggcaacctggcgggggcaccggccctgatgggcaacgtggtcctatggaagcccagtgacactgccatgctggccagctatgctgtctaccgcatycttcgggaggctggcctgccccccaacatcatccagtttgtgccagctgatgggcccctatttggggacactgtcaccagctcagagcacctctgtggcatcaacttcacaggcagtgtgcccaccttcaaacacctgtggaagcaggtggcccagaacctggaccggttccacaccttcccacgcctggctggagagtgcggcggaaagaacttccacttcgtgcaccgctcggccgacgtggagagcgtggtgagcgggaccctccgctcagccttcgagtacggtggccagaagtgttccgcstgctygcgtctctacgtgccgcactcgctgtggccrcagatcaaarggcggctgctggaggagcacagtcggatcaaagtgggcgaccctgcagaggattttgggaccttcttctctgcagtgattgatgccaagtcctttgcccgtatcaagaagtggctggagcacgcrcgctcctcrcccagcctcaccatcctggcygggggcaagtgtgatgactccgtgggctactttgtggagccctgcatcgtggagagcaaggaccctcaggagcccatcatgaaggaggagatcttcgggcctgtactgtctgtgtacgtctacccggaygacaagtacaaggagacgctgcagctgrttgacagcrccaccagctatggcctcacgggggcagtgttctcccaggataaggacgtcgtgcaggaggccacaaaggtgctgaggaatgctgccggcaacttctacatcaacgacaagtccactggctcgatagtgggycagcagccctttgggggggcccgagcctctggaaccaatgacaagccagggggcccacactacatcctgcgctggacgtcgccgcaggtcatcaaggagacacataagcccctgggggactggagctacgcgtacatgcagtgagcccctctcgggctccaccgtccagctgtctgtcygtccagatgcctcctgcttggattctgagtggtcagagatctgtaaagcatgactttcaaggatggttcttaggggactgtgaaartgttgggtcttcctccaggatgcctgcatgggaccccacccggagctggtgtggccattcccsragtgccactggcccatggatgggggtgggtgctggtgccasctgggctgggtgtgggttctgtgtccttccaggatmtgtgtcatttcccatgaggggccggggcaggtggctgggtgggggcacaggctggagtattyttagttctactggttctacactgtgaggtggcaatgggatttgctcagatgccacccaataaaatgcctgttactt

SEQ ID NO: 78 - DNA, 3329 bp, Homo sapiens
atttcaggacttcgctttcgggttcccttgtcctgtgttgtgtaatgcccccgttatggcactagaaatattttttattagccgaagctaaatatagtgggactttggctgatcccgagctcggaggacagccggggtgatccgtttccccccgaggatcgaggtggtgcgctctggacggggttgtgcattctcgccgcgcccgggcggacgatccagcgaacagccccgcttctarccmgagatgctgctgccggcgcccgcgctccgccgcgccctgctgtcccgcccctggaccggggccggcctgcggtggaagcacacctcctccctgaaggtggccaacgagcccgtcttagccttcacgcagggcagccctgagcgagatgccctgcaaaaggccttgaaggacctgaagggccggatggaagccatcccatgcgtggtgggggatgaggaggtgtggacgtcggacgtgcagtaccaagtgtcgccttttaaccatggacataaggtggccaagttctgttatgcagacaagagcctgctcaacaaagccattgaggctgccctggctgcccggaaagagtgggacctgaagcctattgcagaccgggcccagatcttcctgaaggcggcagacatgctgagtgggccgcgcagggctgagatcctcgccaagaccatggtgggacagggtaagaccgtgatccaagcggagattgacgctgcagcggaactcatcgacttcttccggttcaatgccaagtatgcggtggagctggaggggcagcagcccatcagcgtgcccccgagcaccaacagcacggtgtaccggggtctggagggcttcgtggcggccatctcgccctttaacttcactgcaatcggcggcaacctggcgggggcaccggccctgatgggcaacgtggtcctatggaagcccagtgacactgccatgctggccagctatgctgtctaccgcatycttcgggaggctggcctgccccccaacatcatccagtttgtgccagctgatgggcccctatttggggacactgtcaccagctcagagcacctctgtggcatcaacttcacaggcagtgtgcccaccttcaaacacctgtggaagcaggtggcccagaacctggaccggttccacaccttcccacgcctggctggagagtgcggcggaaagaacttccacttcgtgcaccgctcggccgacgtggagagcgtggtgagcgggaccctccgctcagccttcgagtacggtggccagaagtgttccgcstgctygcgtctctacgtgccgcactcgctgtggccrcagatcaaarggcggctgctggaggagcacagtcggatcaaagtgggcgaccctgcagaggattttgggaccttcttctctgcagtgattgatgccaagtcctttgcccgtatcaagaagtggctggagcacgcrcgctcctcrcccagcctcaccatcctggcygggggcaagtgtgatgactccgtgggctactttgtggagccctgcatcgtggagagcaaggaccctcaggagcccatcatgaaggaggagatcttcgggcctgtactgtctgtgtacgtctacccggaygacaagtacaaggagacgctgcagctgrttgacagcrccaccagctatggcctcacgggggcagtgttctcccaggataaggacgtcgtgcaggaggccacaaaggtgctgaggaatgctgccggcaacttctacatcaacgacaagtccactggctcgatagtgggycagcagccctttgggggggcccgagcctctggaaccaatgacaagccagggggcccacactacatcctgcgctggacgtcgccgcaggtcatcaaggagacacataagcccctgggggactggagctacgcgtacatgcagtgagcccctctcgggctccaccgtccagctgtctgtcygtccaggtggccgacctcactgcacagaccccactccagcccctccaccccttcttcatgcacagctgcctttctataatccrggcytgactcccttcttaccactgtattctggcctctcccatgcctcaggctctggtttgagatcgtgctrgggaggaacatggccactaccccttatcccatcggccatgtgggaggtatgaccctggtgcctggcaggttctccctctgccctccactgggcccagtggctcagggacctggggaaaggagatggagcagctcttgggatcctttggggaaaaggaggccattctgggccccttggcaaacctcaccactcacagaggctcctggccttgatccctgcccctccaggtgtccagggtaaagtgtaactcagacygacctgtggggcacagggggcaccagctggccttgccctctctggtctgggctgtctrccttcctcactgtatctttgcccagacccacctgggccagtaggcccctgtccccagccacacaccttagatgctggcatgccttactccaggtgcctgtgtttggccgaggcctgtgtgattcccggtctgcaccacatggcggggttggggggccgctggaggccacctgccaaggcgtgggatgggatggtcctgcyggtttaggcygtgattctggaaaaccttggatgggccttcgtcctatgtcagccttccctytgatcctcaggccctacctgtagagacctccactcctagagccagtctcagggtctgggatttccctgcaggagctcagccaccactgtgccatggtgacacaggccaaggcagacattggccctcccttctcccagcccccagaggcctggccttgrgttygtcagcatgggccgaggacgttgcctgtagaatcctcctctgcctgggagtggctctgtgtggaccagtccctcactggcccattctttttttgacgcagccaatctgtgaccacgattcctcccacagatgcctcctgcttggattctgagtggtcagagatctgtaaagcatgactttcaaggatggttcttaggggactgtgaaartgttgggtcttcctccaggatgcctgcatgggaccccacccggagctggtgtggccattcccsragtgctggtgccasctgggctgggtgtgggttctgtgtccttccaggatmtgtgtcatttcccatgaggggccggggcaggtggctgggtgggggcacaggctggagtattyttagttctactggttctacactgtgaggtggcaatgggatttgctcagatgccacccaataaaatgcctgttacttaatcaca

SEQ ID NO: 79 - DNA, 3351 bp, Homo sapiens
atttcaggacttcgctttcgggttcccttgtcctgtgttgtgtaatgcccccgttatggcactagaaatattttttattagccgaagctaaatatagtgggactttggctgatcccgagctcggaggacagccggggtgatccgtttccccccgaggatcgaggtggtgcgctctggacggggttgtgcattctcgccgcgcccgggcggacgatccagcgaacagccccgcttctarccmgagatgctgctgccggcgcccgcgctccgccgcgccctgctgtcccgcccctggaccggggccggcctgcggtggaagcacacctcctccctgaaggtggccaacgagcccgtcttagccttcacgcagggcagccctgagcgagatgccctgcaaaaggccttgaaggacctgaagggccggatggaagccatcccatgcgtggtgggggatgaggaggtgtggacgtcggacgtgcagtaccaagtgtcgccttttaaccatggacataaggtggccaagttctgttatgcagacaagagcctgctcaacaaagccattgaggctgccctggctgcccggaaagagtgggacctgaagcctattgcagaccgggcccagatcttcctgaaggcggcagacatgctgagtgggccgcgcagggctgagatcctcgccaagaccatggtgggacagggtaagaccgtgatccaagcggagattgacgctgcagcggaactcatcgacttcttccggttcaatgccaagtatgcggtggagctggaggggcagcagcccatcagcgtgcccccgagcaccaacagcacggtgtaccggggtctggagggcttcgtggcggccatctcgccctttaacttcactgcaatcggcggcaacctggcgggggcaccggccctgatgggcaacgtggtcctatggaagcccagtgacactgccatgctggccagctatgctgtctaccgcatycttcgggaggctggcctgccccccaacatcatccagtttgtgccagctgatgggcccctatttggggacactgtcaccagctcagagcacctctgtggcatcaacttcacaggcagtgtgcccaccttcaaacacctgtggaagcaggtggcccagaacctggaccggttccacaccttcccacgcctggctggagagtgcggcggaaagaacttccacttcgtgcaccgctcggccgacgtggagagcgtggtgagcgggaccctccgctcagccttcgagtacggtggccagaagtgttccgcstgctygcgtctctacgtgccgcactcgctgtggccrcagatcaaarggcggctgctggaggagcacagtcggatcaaagtgggcgaccctgcagaggattttgggaccttcttctctgcagtgattgatgccaagtcctttgcccgtatcaagaagtggctggagcacgcrcgctcctcrcccagcctcaccatcctggcygggggcaagtgtgatgactccgtgggctactttgtggagccctgcatcgtggagagcaaggaccctcaggagcccatcatgaaggaggagatcttcgggcctgtactgtctgtgtacgtctacccggaygacaagtacaaggagacgctgcagctgrttgacagcrccaccagctatggcctcacgggggcagtgttctcccaggataaggacgtcgtgcaggaggccacaaaggtgctgaggaatgctgccggcaacttctacatcaacgacaagtccactggctcgatagtgggycagcagccctttgggggggcccgagcctctggaaccaatgacaagccagggggcccacactacatcctgcgctggacgtcgccgcaggtcatcaaggagacacataagcccctgggggactggagctacgcgtacatgcagtgagcccctctcgggctccaccgtccagctgtctgtcygtccaggtggccgacctcactgcacagaccccactccagcccctccaccccttcttcatgcacagctgcctttctataatccrggcytgactcccttcttaccactgtattctggcctctcccatgcctcaggctctggtttgagatcgtgctrgggaggaacatggccactaccccttatcccatcggccatgtgggaggtatgaccctggtgcctggcaggttctccctctgccctccactgggcccagtggctcagggacctggggaaaggagatggagcagctcttgggatcctttggggaaaaggaggccattctgggccccttggcaaacctcaccactcacagaggctcctggccttgatccctgcccctccaggtgtccagggtaaagtgtaactcagacygacctgtggggcacagggggcaccagctggccttgccctctctggtctgggctgtctrccttcctcactgtatctttgcccagacccacctgggccagtaggcccctgtccccagccacacaccttagatgctggcatgccttactccaggtgcctgtgtttggccgaggcctgtgtgattcccggtctgcaccacatggcggggttggggggccgctggaggccacctgccaaggcgtgggatgggatggtcctgcyggtttaggcygtgattctggaaaaccttggatgggccttcgtcctatgtcagccttccctytgatcctcaggccctacctgtagagacctccactcctagagccagtctcagggtctgggatttccctgcaggagctcagccaccactgtgccatggtgacacaggccaaggcagacattggccctcccttctcccagcccccagaggcctggccttgrgttygtcagcatgggccgaggacgttgcctgtagaatcctcctctgcctgggagtggctctgtgtggaccagtccctcactggcccattctttttttgacgcagccaatctgtgaccacgattcctcccacagatgcctcctgcttggattctgagtggtcagagatctgtaaagcatgactttcaaggatggttcttaggggactgtgaaartgttgggtcttcctccaggatgcctgcatgggaccccacccggagctggtgtggccattcccsragtgccactggcccatggatgggggtgggtgctggtgccasctgggctgggtgtgggttctgtgtccttccaggatmtgtgtcatttcccatgaggggccggggcaggtggctgggtgggggcacaggctggagtattyttagttctactggttctacactgtgaggtggcaatgggatttgctcagatgccacccaataaaatgcctgttacttaa

SEQ ID NO: 80 - DNA, 2544 bp, Homo sapiens
ccttctggccccgcgcagataccgcggcctccaccgcgtcccgaggagcggccgagtgccctctctcgcctcggcgcccgcatccggggccatccgtcctgccgtckctgcggaggccgcatctggcgcgcatctggaaccgcycggccggccgcgctggagcccgcgcccaccctggcccggccgcgccgggagccctgcccggagctggagccgcacctggagccgcgggcccggggccctgagccgcgcagccggcgcatggtgaactcgctgctgttcggggagatggccttggccttcggctgcccgccgggcggcggcggcgggggctgccctggcgggggcggcggcggcggcggggcagggccgggtccgtcgccggtgacggcggcgctgcgggacgacctgggctccaacatccacctcttgaaggggctcaacgtgcgcttccgctgcttcctggctaaggtgcacgagctggagcggcgcaaccggctgctggagaagcagctggagcagcagcagagcgagcgcgagcggcggctgcgctacaagaccttctcccgcgagcaggccgtgcagaccgggcccgagttgctgcggcccccggcgcccggcggcgggcacggcctcagcagtggcgcggcggccggcgccaacgccaatgccgtggccctgggcggcctgccccccggcggcggctcgcacccgcagcactacggccgcctgcccgggaccatctggagctacacgcaggtgcggcgcacgggcggcggcggcgtggagaccgtgcagggccccggcgtgtcgtgggtgcaccccgacggcgtgggcgtgcagatcgacaccatcacgccggagatccgcgcgctctacaacgtgctggccaaggtgaagcgcgagcgcgacgagtataagcggaggtgggaggaggagctcgccaagcgcatgaaccttcagaccatggtggacacgctgcaggaggcagcacaggaggctgatgccatccaggaggagatgaatgagaagatcgagcggctcaaggccgagctggtggtgtttaaggggcttatgagtgaccccatgacagacctggacacaaagatccaagaaaaggccatgaaggtggacatggacatctgccgccgaatcgatatcacggccaagctgtgcgatgtcgcacagcagcggaactcagaagacgtgtccaagatcttccaggtggtccccaaaaagaaagagcgtaaggtggcttccgatgatgacatctctgagcaggacggggaggtgaaccggttctcggacgatgagrtcggctccatgaacatcaccgatgagatgaagcgcatgtttaaccagctgcgggagacstttgactttgacgacgactgtgacagcctgacgtgggargagaatgaagacacgctgctgctctgggaggatttcaccaactgcaatccgaccatcgacctgcagggcgagcaagaggaaaacttgggcaacttgatccatgagaccgaatccttcttcaagacgagagacaaggagtaccaggaaacgataggtcagatcgagctcgagctggccacagccaaaagtgacatgaaccgacacctgcacgagtacatggagatgtgcagcatgaagcgaggcctggacgtgcagatggagacctgccgccggctcatcaaaggctcygcagacaggaattcaccgtcccccagctccrtggccagcagcgactcaggaagtacagatgagatccaggatgagttcgagcgcgaggcggatgtggagcccatggtcagctgatgactgaggccctgcgagcctggtggtcttggtgatggggccctgccacctctcctcatggggccaggaaggcccctcggagtggggttcgaagccacaccacacagactttctctgccctcccttctctggaggcccygagggactgctgcttccttccttccttccacaccaccaacgggtgccccgtctccatcccccacccacccaaggaatggtgctgtcaatttctattgttctccacattacaaatgcagacttctgtgcggactttgcagtgttaactgtgccttctcccttaagctgagccactttgagctccaaagaattattcctagcaggtgtttttatacagaactctaagctgagggccgggccaaccggccgtggtgtaatgtggtttctgccgtccgtcccacctgctcctctgattggccatgggctatgccctcccttcctcctgagccagcccagactcggcctggagcttggggtgctctgccaacccccaggaaggagccgcttgcctctgtgagctttctaggcctgggtagggaccaccccaattttctcactccctgaaggagagaaaggtggaaggaagggaaggaggacacattttaattttttggggggatcgagtggcaaagttgaagggacaaggcactgtgaggggaaggcagagsctcactgtgtttaaactactatgcaaaaaacaaaacaaacaac

SEQ ID NO: 81 - DNA, 1903 bp, Homo sapiens
tggcgcggcggccggcgccaacgccaatgccgtggccctgggcggcctgccccccggcggcggctcgcacccgcagcactacggccgcctgcccgggaccatctggagctacacgcaggtgcggcgcacgggcggcggcggcgtggagaccgtgcagggccccggcgtgtcgtgggtgcaccccgacggcgtgggcgtgcagatcgacaccatcacgccggagatccgcgcgctctacaacgtgctggccaaggtgaagcgcgagcgcgacgagtataagcggaggtgggaggaggagctcgccaagcgcatgaaccttcagaccatggtggacacgctgcaggaggcagcacaggaggctgatgccatccaggaggagatgaatgagaagatcgagcggctcaaggccgagctggtggtgtttaaggggcttatgagtgaccccatgacagacctggacacaaagatccaagaaaaggccatgaaggtggacatggacatctgccgccgaatcgatatcacggccaagctgtgcgatgtcgcacagcagcggaactcagaagacgtgtccaagatcttccaggtggtccccaaaaagaaagagcgtaaggtggcttccgatgatgacatctctgagcaggacggggaggtgaaccggttctcggacgatgagrtcggctccatgaacatcaccgatgagatgaagcgcatgtttaaccagctgcgggagacstttgactttgacgacgactgtgacagcctgacgtgggargagaatgaagacacgctgctgctctgggaggatttcaccaactgcaatccgaccatcgacctgcagggcgagcaagaggaaaacttgggcaacttgatccatgagaccgaatccttcttcaagacgagagacaaggagtaccaggaaacgataggtcagatcgagctcgagctggccacagccaaaagtgacatgaaccgacacctgcacgagtacatggagatgtgcagcatgaagcgaggcctggacgtgcagatggagacctgccgccggctcatcaaaggctcygcagacaggaattcaccgtcccccagctccrtggccagcagcgactcaggaagtacagatgagatccaggatgagttcgagcgcgaggcggatgtggagcccatggtcagctgatgactgaggccctgcgagcctggtggtcttggtgatggggccctgccacctctcctcatggggccaggaaggcccctcggagtggggttcgaagccacaccacacagactttctctgccctcccttctctggaggcccygagggactgctgcttccttccttccttccacaccaccaacgggtgccccgtctccatcccccacccacccaaggaatggtgctgtcaatttctattgttctccacattacaaatgcagacttctgtgcggactttgcagtgttaactgtgccttctcccttaagctgagccactttgagctccaaagaattattcctagcaggtgtttttatacagaactctaagctgagggccgggccaaccggccgtggtgtaatgtggtttctgccgtccgtcccacctgctcctctgattggccatgggctatgccctcccttcctcctgagccagcccagactcggcctggagcttggggtgctctgccaacccccaggaaggagccgcttgcctctgtgagctttctaggcctgggtagggaccaccccaattttctcactccctgaaggagagaaaggtggaaggaagggaaggaggacacattttaattttttggggggatcgagtggcaaagttgaagggacaaggcactgtgaggggaaggcagagsctcactgtgtttaaactactatgcaaaaaacaaaacaaacaac

SEQ ID NO: 82 - DNA, 3196 bp, Homo sapiens
caggcgggwcgggctctcccttgggtgcttagccccgcccccgtcccactctgccctgttgctgtcgcgccgctgctggttgctgtccctggacccctaccatggaggagaccatcaaagatccccccacatcagctgtcttgctggatcactgtcatttctctcaggtcatctttaacagtgtggagaagttctacatccctggaggggacgtcacatgtcattataccttcacccagcatttcatccctcgtcgaaaggattggattggcatctttagagtggggtggaagacaacccgtgagtattacaccttcatgtgggttactttgcccattgacctaaacaacaaatcagctaaacagcaggaagtccaattcaaagcttactacctgcccaaggatgatgagtattaccagttctgctatgtggatgaggatggtgtggtccggggagcaagtattcctttccaattccgtccagaaaatgaggaagacatcctggttgttaccactcaggragaggtggaagagattgagcagcacaacaaggagctttgcaaagaaaaccaggagctgaaggacagctgtatcagcctccagaagcagaactcagacatgcaggctgagctccaaaagaagcaggaggagctagaaaccctacagagcatcaataagaagttggaactgaaagtgaaagaacagaaggactattgggagacagagctgcttcaactgaaagaacaaaaccagaagatgtcctcagaaaatgagaagatgrgaatcagagtggatcagcttcaggcccagctgtcaactcaagagaaagaaatggagaagcttgytcagggagatcaagataagacagagcagttagagcagctgaaaaaggaaaatgaccacctctttctcagtttaactgaacagaggaaggaccagaagaagctcgagcagacagtggagcaaatgaagcagaatgaaactactgcaatgaagaaacaacaggaattaatggatgaaaactttgacctgtcaaaaagactgagtgagaacgaaattatatgtaatgctctgcagagacagaaagagagattggaaggagaaaatgatcttttgaagagggagaacagcagattgctcagttacatgggtctggattttaattctttgccgtatcaagtacctacttcagatgaaggaggcgcaagacaaaatccaggacttgcctatggaaacccatattctggtatccaagaaagttcttccsccagcccgctctccatcaagaaatgccctatctgcaaagcagatgatatttgtgatcacaccttggagcaacagcagatgcagcccctttgyttcaattgtccaatttgtgacaagatcttcccagctacagagaagcagatctttgaagaccacgtgttctgccactctctctgagtatcccaacctcttggatgtatacagagattttatagaatagaacctrtagcttctaccatgagttatatgagtcaagatcctgcctaacctgaaattattagggatttactcagccctgctgccgctaacagtggagttatgtcactgatctgaaggtcactgttaagggcttctgctgccatccttgtgggttgctacctttaagtcgcataactctagctgtatcatcctctcacctgtcattcttctgagggtctcagtacaagggccctgggatggagccaacctgggtattcacaacaggcctgacttgatactaagtgattagttttccaagttgtcccactgccattcaaagtcagcccttgagtgtatttgttctcagtcctaaccctggggccagagattggtccgaggttgagaattccttcctcctcatccttggtgttgctttctccaaatgattgttttagactagccaaaaatgccgtggcaaagagctcagaaatccaatttggataccaaaggtttctcatgttaatttctcagcccccaaagaagcatcttactcctgaaccttagacaggaagtattgtttcagtcacagaaagcttttctgggtacctctggttagcactttctactctctgatatttcctatgtacatagcttttattgttgtaaatcctttcttaatggttaaataggattgttagcaactatgggtttgcagttttctgagtaggtgagttttgaatatgggtaaatcagaataatgagacaacttgttaatctctttaatactaaaaataaattactcttctatttcagggacttaggtaatttaaaataaaccttcaatttatggtcttctrttttgaagctcatgggaaaattgtgatcaaaagggctatgggaagggcagaccccgccaatgatttctcttcacctgtcttaagattaaataaaaaagagtgtcctggcagttatcttgaggtggggaaggaggtgatgaaacattagtttgtgaaatccaaggccctggcttkctttctttcttttttttttttttttttttgaaacagtctctctctgtcacccaggctggcgtgcaatggcgcagttgactcactacagcctctgcctcccaggttcaagcgattctcatgccttagcctcccaagtagctgggattacaggtgtgtgccrcaatgcccagctaatttttgtgtttttagtagagacagggtttcactatgttggccaggctggtctcgaactcctggcctcacgtgatctgtccacttcagccstccaaagtgctgggattacaagcgtgagccactgtgctgggcccgaggccctgacttcttgctgtaactttccatgcattttttttaaaaggagcagtgtggattttcgcaccctttgtgaactaagttcaatgygctctatccaaatttgcctaattgaactataagaaagtaataattccattttctatcccctcagggactgaacaaatggaaataactcccaggcagtatcaggtggtcactacagagacttccacaaaaacttttgaatgatgtgaaacacgatgtcatgaataagggttgagccaactatagctctgtgttcctactgggctttccctaatgtggttgggagttatgccctagactaactgtattgtcctagtcacagctccttgctttgatttcatccttgataaaatgaagatgaaactt

SEQ ID NO: 83 - DNA, 3268 bp, Homo sapiens
caggcgggwcgggctctcccttgggtgcttagccccgcccccgtcccactctgccctgttgctgtcgcgccgctgctggttgctgtccctggacccctaccatggaggagaccatcaaagatccccccacatcagctgtcttgctggatcactgtcatttctctcaggtcatctttaacagtgtggagaagttctacatccctggaggggacgtcacatgtcattataccttcacccagcatttcatccctcgtcgaaaggattggattggcatctttagagcatttaaatgtttccaagacaaattgraacaagaactactcaaatggaggagccaaggacagaaattgcaggtggggtggaagacaacccgtgagtattacaccttcatgtgggttactttgcccattgacctaaacaacaaatcagctaaacagcaggaagtccaattcaaagcttactacctgcccaaggatgatgagtattaccagttctgctatgtggatgaggatggtgtggtccggggagcaagtattcctttccaattccgtccagaaaatgaggaagacatcctggttgttaccactcaggragaggtggaagagattgagcagcacaacaaggagctttgcaaagaaaaccaggagctgaaggacagctgtatcagcctccagaagcagaactcagacatgcaggctgagctccaaaagaagcaggaggagctagaaaccctacagagcatcaataagaagttggaactgaaagtgaaagaacagaaggactattgggagacagagctgcttcaactgaaagaacaaaaccagaagatgtcctcagaaaatgagaagatgrgaatcagagtggatcagcttcaggcccagctgtcaactcaagagaaagaaatggagaagcttgytcagggagatcaagataagacagagcagttagagcagctgaaaaaggaaaatgaccacctctttctcagtttaactgaacagaggaaggaccagaagaagctcgagcagacagtggagcaaatgaagcagaatgaaactactgcaatgaagaaacaacaggaattaatggatgaaaactttgacctgtcaaaaagactgagtgagaacgaaattatatgtaatgctctgcagagacagaaagagagattggaaggagaaaatgatcttttgaagagggagaacagcagattgctcagttacatgggtctggattttaattctttgccgtatcaagtacctacttcagatgaaggaggcgcaagacaaaatccaggacttgcctatggaaacccatattctggtatccaagaaagttcttccsccagcccgctctccatcaagaaatgccctatctgcaaagcagatgatatttgtgatcacaccttggagcaacagcagatgcagcccctttgyttcaattgtccaatttgtgacaagatcttcccagctacagagaagcagatctttgaagaccacgtgttctgccactctctctgagtatcccaacctcttggatgtatacagagattttatagaatagaacctrtagcttctaccatgagttatatgagtcaagatcctgcctaacctgaaattattagggatttactcagccctgctgccgctaacagtggagttatgtcactgatctgaaggtcactgttaagggcttctgctgccatccttgtgggttgctacctttaagtcgcataactctagctgtatcatcctctcacctgtcattcttctgagggtctcagtacaagggccctgggatggagccaacctgggtattcacaacaggcctgacttgatactaagtgattagttttccaagttgtcccactgccattcaaagtcagcccttgagtgtatttgttctcagtcctaaccctggggccagagattggtccgaggttgagaattccttcctcctcatccttggtgttgctttctccaaatgattgttttagactagccaaaaatgccgtggcaaagagctcagaaatccaatttggataccaaaggtttctcatgttaatttctcagcccccaaagaagcatcttactcctgaaccttagacaggaagtattgtttcagtcacagaaagcttttctgggtacctctggttagcactttctactctctgatatttcctatgtacatagcttttattgttgtaaatcctttcttaatggttaaataggattgttagcaactatgggtttgcagttttctgagtaggtgagttttgaatatgggtaaatcagaataatgagacaacttgttaatctctttaatactaaaaataaattactcttctatttcagggacttaggtaatttaaaataaaccttcaatttatggtcttctrttttgaagctcatgggaaaattgtgatcaaaagggctatgggaagggcagaccccgccaatgatttctcttcacctgtcttaagattaaataaaaaagagtgtcctggcagttatcttgaggtggggaaggaggtgatgaaacattagtttgtgaaatccaaggccctggcttkctttctttcttttttttttttttttttttgaaacagtctctctctgtcacccaggctggcgtgcaatggcgcagttgactcactacagcctctgcctcccaggttcaagcgattctcatgccttagcctcccaagtagctgggattacaggtgtgtgccrcaatgcccagctaatttttgtgtttttagtagagacagggtttcactatgttggccaggctggtctcgaactcctggcctcacgtgatctgtccacttcagccstccaaagtgctgggattacaagcgtgagccactgtgctgggcccgaggccctgacttcttgctgtaactttccatgcattttttttaaaaggagcagtgtggattttcgcaccctttgtgaactaagttcaatgygctctatccaaatttgcctaattgaactataagaaagtaataattccattttctatcccctcagggactgaacaaatggaaataactcccaggcagtatcaggtggtcactacagagacttccacaaaaacttttgaatgatgtgaaacacgatgtcatgaataagggttgagccaactatagctctgtgttcctactgggctttccctaatgtggttgggagttatgccctagactaactgtattgtcctagtcacagctccttgctttgatttcatccttgataaaatgaagatgaaactt

SEQ ID NO: 84 - DNA, 1872 bp, Homo sapiens
tctccttcaggtgtttacaaaatatgggaagtgttacatgtttaactcaggcgaggatggcaaacctctgctcaccacggtcaagggggggacaggcaacgggctggagatcatgctggacattcagcaggatgagtacctgcccatctggggagagacagaggaaacgacatttgaagcaggagtgaaagttcagatccacagtcagtctgagccacctttcatccaagagctgggctttggggtggctccagggttccagacctttgtggccacacaggagcagaggctcacatacctgcccccaccgtggggtgagtgccgatcctcagagatgggcctcgacttttttcctgtttacagcatcaccgcctgtaggattgactgtgagacccgctacattgtggaaaactgcaactgccgcatggttcacatgccaggggatgcccctttttgtacscctgagcagcacaaggagtgtgcagagcctgccctaggtctgttggcggaaaaggacagcaattactgtctctgcaggacaccctgcaacctaacccgctacaacaaagagctctccatggtgaagatccccagcaagacatcagccaagtaccttgagaagaaatttaacaaatcagaaaaatatatctcagagaacatccttgttctggatatattttttgaagctctcaattatgagacaattgaacagaagaaggcgtatgaagttgctgccttacttggtgatattggtggtcagatgggattgttcattggtgctagtatccttacaatactagagctctttgattatatttatgagctgatcaaagagaagctattagacctgcttggcaaagaggaggacgaagggagccacgatgagaatgtgagtacttgtgacacaatgccaaaccactctgaaaccatcagtcacrctgtgaacgtgcccctgcagacgaccctggggaccttggaggagattgcctgctgacacccctcgagtcacccagcactccctscaaacagaccttgaggcccaagacccaggacaaggaacagcaagctcaggtgggatggccccagtgctggaaagaagcaagagccccctatgcacacattgcagactagctgcctagacctcgctccggccacgtccaacacgacgcatccttgggccccgccgtgcgtccctcttaggagagatgagtcacactctggaactgtccragaacgaacctgccatcacatctcactgccagatgtataaagcacctgcmtgctcagacttcttrtggcgccacctccacgtctgtcttgtacatgacactcctccacgcggtttccagtgtccacactgctgcccgtgcagtgggaccagattccaggtccaaagtcaccatgaggccaccctggaatcagaactgcacaatcaagagggaacccatggractctctgctacattcagttcttgtgtcgtttgtgaaagttcttaacctgcccaaaaacccccttttccccaagctgcccaysgggcttcggcgccaaaggtgacccgcgccaacctccctccccccmagtgcctrtgacggcggcacagcagccagcgggtgggggacgcctgtgttcacccatggtgcccatgtcgttcttctctccctgtgacacagcttgtacagtctgawtctttttatctggggtaggggggcttttatgtttgtccgatggagatttgttttgttttgcttcattttatgcttttttattttagttttgatgttctgaggtttgctttggtttttccattttctttggcatttatttattcgtgcttcaaatcacagtcatattaaaagctggtcttgtggaaa

SEQ ID NO: 85 - DNA, 1883 bp, Homo sapiens
tctctctcttctctccttcaggtgtttacaaaatatgggaagtgttacatgtttaactcaggcgaggatggcaaacctctgctcaccacggtcaagggggggacaggcaacgggctggagatcatgctggacattcagcaggatgagtacctgcccatctggggagagacagaggaaacgacatttgaagcaggagtgaaagttcagatccacagtcagtctgagccacctttcatccaagagctgggctttggggtggctccagggttccagacctttgtggccacacaggagcagaggctcacatacctgcccccaccgtggggtgagtgccgatcctcagagatgggcctcgacttttttcctgtttacagcatcaccgcctgtaggattgactgtgagacccgctacattgtggaaaactgcaactgccgcatggttcacatgccaggggatgcccctttttgtacscctgagcagcacaaggagtgtgcagagcctgccctaggtctgttggcggaaaaggacagcaattactgtctctgcaggacaccctgcaacctaacccgctacaacaaagagctctccatggtgaagatccccagcaagacatcagccaagtaccttgagaagaaatttaacaaatcagaaaaatatatctcagagaacatccttgttctggatatattttttgaagctctcaattatgagacaattgaacagaagaaggcgtatgaagttgctgccttacttggtgatattggtggtcagatgggattgttcattggtgctagtatccttacaatactagagctctttgattatatttatgagctgatcaaagagaagctattagacctgcttggcaaagaggaggacgaagggagccacgatgagaatgtgagtacttgtgacacaatgccaaaccactctgaaaccatcagtcacrctgtgaacgtgcccctgcagacgaccctggggaccttggaggagattgcctgctgacacccctcgagtcacccagcactccctscaaacagaccttgaggcccaagacccaggacaaggaacagcaagctcaggtgggatggccccagtgctggaaagaagcaagagccccctatgcacacattgcagactagctgcctagacctcgctccggccacgtccaacacgacgcatccttgggccccgccgtgcgtccctcttaggagagatgagtcacactctggaactgtccragaacgaacctgccatcacatctcactgccagatgtataaagcacctgcmtgctcagacttcttrtggcgccacctccacgtctgtcttgtacatgacactcctccacgcggtttccagtgtccacactgctgcccgtgcagtgggaccagattccaggtccaaagtcaccatgaggccaccctggaatcagaactgcacaatcaagagggaacccatggractctctgctacattcagttcttgtgtcgtttgtgaaagttcttaacctgcccaaaaacccccttttccccaagctgcccaysgggcttcggcgccaaaggtgacccgcgccaacctccctccccccmagtgcctrtgacggcggcacagcagccagcgggtgggggacgcctgtgttcacccatggtgcccatgtcgttcttctctccctgtgacacagcttgtacagtctgawtctttttatctggggtaggggggcttttatgtttgtccgatggagatttgttttgttttgcttcattttatgcttttttattttagttttgatgttctgaggtttgctttggtttttccattttctttggcatttatttattcgtgcttcaaatcacagtcatattaaaagctggtcttgtggaaa

SEQ ID NO: 86 - DNA, 1606 bp, Homo sapiens
gagacctgtcaatcaatcaatcaatcaatcaatcaagaggaggctggcgggagcatgctcgtgaccaccgggggcgacatagaccctaaccctaagtccaaccccaaggcagaccccaccgtcccgccaggcgcactcctaagagcgcggcttccggagcaaagccgctgacccccgcccccagggtcttggcgccgattggccaacgagagcgcagggcggagccaaatcttaaaggatccgggagctaagccagacccgggtggcggtggcagctgcgaaacccagggagccgatgccacgtgacccaatgtggacttcttttaaacctttctaatgcccataacccagcctcagacccatggagcccacgagagactgcccgctgttcgggggcgccttttccgccatcctccccatgggggccattgacgtaagcgayctccgaccggtcccggacaatcaagaagttttctgccatcccgtgacggaccagagcctgatagtggaacttctcgagctgcaggcccacgtacggggcgaagcggctgcgcggtaccactttgaggatgttggtggcgtgcagggggctagggctgtccatgtggagtctgttcagcctctcagtttggagaacctggccctgaggggccgctgtcaagaagcctgggtcctctctggcaagcagcagatagctaaggaaaaccagcaggtgagggcccgagagtgtgtaatgtcctggaagggcggtagcggggacgcagagatccaggtaagcatcctgactctgatccccttaggtagcaaaggacgtgacacttcatcaggccttgctgaggctgccccagtaccagactgatctcttgcttaccttcaatcagcccccccctgacaacaggtcatctcttggccccgaaaatctgtcacctgcaccctggagcctgggtgactttgaacarctggtgaccagtctgacccttcacgatcctaacatctttggtccccagtaaaggcgctgaagcactgcatgatgttgctgagaacttggggactcggttctgtgagggggaaaagaggttgaaaagagggtttcctcttatttcttccctgtgcgtaaacataagacaatccctcttcagaataaacttgctttataatcaatataatctctgtgcctttgaatctaacaggacacctgggtcccagacgcctgggaattgggtctctcrattccctttggttttggagggaggagtttaaaactgtgcatgggagcaggagggactcaagggtggcagtggtgagtgggaggaaatacactttgggatgactcsttcagccctgagagaggggtgtgagttacccagggaatgggtagggaaggtttaaagcaacacccaaggaaagaagggaaactcatctcttgtagtgattcaaccctgagaacagatggggagtggggttggctgtcccccatggatggatgaaaggtcacctaatcagtagtcaccaggacatagtggtggaggcacaagtggccaaggagtgctcatttggtggagactgggaaagcggctgttatttagtgtctgtgtagtagagggag

SEQ ID NO: 87 - DNA, 1830 bp, Homo sapiens
gagacctgtcaatcaatcaatcaatcaatcaatcaagaggaggctggcgggagcatgctcgtgaccaccgggggcgacatagaccctaaccctaagtccaaccccaaggcagaccccaccgtcccgccaggcgcactcctaagagcgcggcttccggagcaaagccgctgacccccgcccccagggtcttggcgccgattggccaacgagagcgcagggcggagccaaatcttaaaggatccgggagctaagccagacccgggtggcggtggcagctgcgaaacccagggagccgatgccacgtgacccaatgtggacttcttttaaacctttctaatgcccataacccagcctcagacccatggagcccacgagagactgcccgctgttcgggggcgccttttccgccatcctccccatgggggccattgacgtaagcgayctccgaccggtcccggacaatcaagaagttttctgccatcccgtgacggaccagagcctgatagtggaacttctcgagctgcaggcccacgtacggggcgaagcggctgcgcggtaccactttgaggatgttggtggcgtgcagggggctagggctgtccatgtggagtctgttcagcctctcagtttggagaacctggccctgaggggccgctgtcaagaagcctgggtcctctctggcaagcagcagatagctaaggaaaaccagcaggtgagggcccgagagtgtgtaatgtcctggaagggcggtagcggggacgcagagatccaggtaagcatcctgactctgatccccttaggtagcaaaggacgtgacacttcatcaggccttgctgaggctgccccagtaccagactgatctcttgcttaccttcaatcagcccccgtaaggaggaaggaaygggcgggtatctcatgactgggttcccaggagaatcgggctgggagggacagaacagggagactcactggtgggatcctccaaggaagcaggagtgggccagaggtttggggtaactgatacccaggtcctctggggaacaggaattggcaatttccaaacctcaggcctggatgatgttctgtctccatctgttcccccaccccaagccctgacaacaggtcatctcttggccccgaaaatctgtcacctgcaccctggagcctgggtgactttgaacarctggtgaccagtctgacccttcacgatcctaacatctttggtccccagtaaaggcgctgaagcactgcatgatgttgctgagaacttggggactcggttctgtgagggggaaaagaggttgaaaagagggtttcctcttatttcttccctgtgcgtaaacataagacaatccctcttcagaataaacttgctttataatcaatataatctctgtgcctttgaatctaacaggacacctgggtcccagacgcctgggaattgggtctctcrattccctttggttttggagggaggagtttaaaactgtgcatgggagcaggagggactcaagggtggcagtggtgagtgggaggaaatacactttgggatgactcsttcagccctgagagaggggtgtgagttacccagggaatgggtagggaaggtttaaagcaacacccaaggaaagaagggaaactcatctcttgtagtgattcaaccctgagaacagatggggagtggggttggctgtcccccatggatggatgaaaggtcacctaatcagtagtcaccaggacatagtggtggaggcacaagtggccaaggagtgctcatttggtggagactgggaaagcggctgttatttagtgtctgtgtagtagagggag

SEQ ID NO: 88 - DNA, 1518 bp, Homo sapiens
gagacctgtcaatcaatcaatcaatcaatcaatcaagaggaggctggcgggagcatgctcgtgaccaccgggggcgacatagaccctaaccctaagtccaaccccaaggcagaccccaccgtcccgccaggcgcactcctaagagcgcggcttccggagcaaagccgctgacccccgcccccagggtcttggcgccgattggccaacgagagcgcagggcggagccaaatcttaaaggatccgggagctaagccagacccgggtggcggtggcagctgcgaaacccagggagccgatgccacgtgacccaatgtggacttcttttaaacctttctaatgcccataacccagcctcagacccatggagcccacgagagactgcccgctgttcgggggcgccttttccgccatcctccccatgggggccattgacgtaagcgayctccgaccggtcccggacaatcaagaagttttctgccatcccgtgacggaccagagcctgatagtggaacttctcgagctgcaggcccacgtacggggcgaagcggctgcgcggtaccactttgaggatgttggtggcgtgcagggggctagggctgtccatgtggagtctgttcagcctctcagtttggagaacctggccctgaggggccgctgtcaagaagcctgggtcctctctggcaagcagcagatagctaaggaaaaccagcaggtagcaaaggacgtgacacttcatcaggccttgctgaggctgccccagtaccagactgatctcttgcttaccttcaatcagcccccccctgacaacaggtcatctcttggccccgaaaatctgtcacctgcaccctggagcctgggtgactttgaacarctggtgaccagtctgacccttcacgatcctaacatctttggtccccagtaaaggcgctgaagcactgcatgatgttgctgagaacttggggactcggttctgtgagggggaaaagaggttgaaaagagggtttcctcttatttcttccctgtgcgtaaacataagacaatccctcttcagaataaacttgctttataatcaatataatctctgtgcctttgaatctaacaggacacctgggtcccagacgcctgggaattgggtctctcrattccctttggttttggagggaggagtttaaaactgtgcatgggagcaggagggactcaagggtggcagtggtgagtgggaggaaatacactttgggatgactcsttcagccctgagagaggggtgtgagttacccagggaatgggtagggaaggtttaaagcaacacccaaggaaagaagggaaactcatctcttgtagtgattcaaccctgagaacagatggggagtggggttggctgtcccccatggatggatgaaaggtcacctaatcagtagtcaccaggacatagtggtggaggcacaagtggccaaggagtgctcatttggtggagactgggaaagcggctgttatttagtgtctgtgtagtagagggag

SEQ ID NO: 89 - DNA, 1988 bp, Homo sapiens
tgagggcctcggttgtggctcttgaaggctccccattggccccgcgctccagyggcaggagtgtggcggcccggcctccgcargctacccggggttgaagctactgcgagctccggtggctgcctggggacgctcagggacgctcattcctggccagagtcctgacttctttctcggatcgagatctcgttgctggctcgaggaaatcaccggctsttctcccggatccttttcttctctcacttgctggctttcttcttcctgmctccctggcttccatctcccaaccccgcgattccctcctctactcccgtgctcccgtcgcccgccatcctgagccatcccacctgcaaccttctgtcttttgcccctccttgacctcagagggtcctgccttaagcttctcaccagaatctcctagatttctatctcttccctgcttgccagctcttgactcccaaattccagctgacgtttgaccacttgacatttgaccctgacacccttgactgcaaatctaaattcttatcttctgcaacctgtactgctgaaacaggccttccccctgtcttccaaccccgctttctgacacccatttttactttcttactcttgggtcagttcctgctacagctatcccaccatggacttcttgatgagtggcctggcagcctgcggggcctgtgtattcaccaatcccctggaggtggtgaagaccaggatgcagttgcaaggagaactgcaggcccctggcacataccagcggcactaccgaaatgtcttccatgccttcatcaccatcggcaaggtggatggccttgctgccctgcagaaaggcctggcccccgccctcttgtaccagttcctgatgaatggcatccgactgggcacctatgggctggctgaggctgggggctacctgcacacagccgaaggcacccacagtcctgcccgcagcgcagcagctggggccatggctggggtcatgggagcctacttggggagccccatctacatggtgaagacacacctgcaggcacaggcagcctcagaaattgctgtagggcaccagtataagcatcagggcatgtttcaggcgctaaccgagattggccagaaacatggtctggtggggttatggcgtggggctctgggcggcctgccccgagttatcgtmggttcctccacccagctgtgcaccttctcatccaccaaggacctcctgagccagtgggagatctttcctccccagagctggaagttggcgctggtggctgccatgatgagtggcattgcagttgtcttggccatggcaccctttgatgtggcctgcacaaggctctacaaccagcccacagatgcacagggcaagggcctcatgtaccgggggatactggacgctctgctgcagacagctcggaccgagggcatttttggcatgtacaagggtataggtgcctcctacttccgcctcggcccccacaccatcctctccctcttcttctgggaccagctgcgctccctctactacacagacactaaataacagccgctttcccagtctccaccaaatgagcactccttggccacttgtgcctccaccactatgtcctggtgactactgattaggtgacctttcatccatccatgggggacagccaaccccactccccatctgttctcagggttgaatcactacaagagatgagtttcccttctttccttgggtgttgctttaaaccttccctacccattccctgggtaactcacacccctctctcagggctgaasgagtcatcccaaagtgtatttcctcccactcaccactgccacccttgagtccctcctgctcccatgcacagttttaaactcctccctccaaaaccaaagggaatygagagacccaattcccaggcgtctgggacccaggtgtcctgttagattcaaaggcacagagattatattgattataaagcaagtttattctg

SEQ ID NO: 90 - DNA, 1799 bp, Homo sapiens
caggagaaccgagtcttggccttaactggctggcaacgtaaaacctgccctccacaaggacaagatgaaaacttggggatttggaggggacaacaaattagactcaatcacaatttcaaacttttggatgtcaatatatccatcaagaaattgaaaagaggcctggcatggtggccgatgcctgtcatcccagcactttgggagaccaacgtcggaggatcacttgaggtcaggagttccagaccagcctgggcaacgtggtcccaggagttgcagaaacgccaccaggaccttcagagcaccagttagacaaggagagccaggaggagctgggccccaacctcatccaaaagcacagactcccaggctggaatggtgtcctcatatcgaggaagaggatactgaggcycagaaatgtgccctagctttactaggagcgcccccacctaaagatcctccccctaaatacacccccagaccccgcccagctgtggtcattggagtgtttactctgcaggcagggggaggagggcgggactgagcaggcggagacggacaaagtccggggactataaaggccggtccggcagcatctggtcagtcccagctcagagccgcaacctgcacagccatgcccgggcaagaactcaggacgstgaatggctctcagatgctcctggtgttgctggtgctctcgtggctgccgcatgggggcgccctgtctctggccgaggcgagccgcgcaagtttcccgggaccctcagagttrcacwccgaagactccagattccgagagttgcggaaacgctacgaggacctgctaaccaggctgcgggccaaccagagctgggaagattcgaacaccgacctcgtcccggcccctgcagtccggatactcacgccagaagtgcggctgggatccggcggccacctgcacctgcgtatctctcgggccgcccttccygaggggctccccgaggcctcccgccttcaccgggctctgttccggctgtccccgacggcgtcaaggtcgtgggacgtgacacgacckctgcggcgtcagctcagccttgcaagaccccaggcgcccgcgctgcacctgmgactgtcgccgccgccgtcgcagtcggaccaactgctggcagaatcttcgtccgcacggccccagctggagttgcacttgcggccgcaagccgccagggggcgccgcagagcgcgtgcgcgcaacggggacsactgtccgctcgggcccgggcgttgctgccgtctgcacacggtccgcgcgtcgctggaagacctgggctgggccgattgggtgctgtcgccacgggaggtgcaagtgaccatgtgcatcggcgcgtgcccgagccagttcsgggcggcaaacatgcacgcgcagatcaagacgagcctgcaccgcctgaagcccgacacggtgccagcgccctgctgcgtgcccgccagctacaatcccatggtgctcattcaaaagaccgacaccggggtgtcgctccagacctatgatgacttgttagccaaagactgccactgcatatgagcagtcctggtccttccactgtgcacctgcgcggrggasgcgacctcagttgtcctgccctgtggaatgsgctcaaggttcctgagacacccgattcctgcccaaacagctgyatttatataagtctgttatttattattaatttattggggtgaccttcttggggactcgggggctggtctgatggaactgtgtatttatttaaaactctggtgataaaaataaagctgtctgaactgtt

SEQ ID NO: 91 - DNA, 1790 bp, Homo sapiens
agacagagggagcagtgaatagcaatagggtgtttccaccatggtcttcactcaggccccggctgaaatcatgggccacctccrgatacgcagcctcctggcccggcagtgcctggcagagtttctgggtgtgtttgtactcatgctcctcacccaaggagctgtggcccaggctgtcaccagtggagaaaccaaaggcaacttcttcaccatgtttctggctggctctctggccgttacgatagccatctacgtgggtggtaacgtctcaggggcccacctgaatccagccttctccctggccatgtgcatcgttggacgcctcccctgggtcaagctccccatttacatcttggtgcagttgctgtctgctttctgtgcttcgggagccacctatgttctctacyaygatgccctacagaactatacaggtgggaacctgacagtgactggccccaaggagacagcctccatttttgccacctatcctgccccctatctgtccctgaacaatggcttcctggatcaggttctgggcacygggatgctgattgtggggctcttggccatcctggacagacggaacaagggagtccctgcgggtctggagcctgtggtggtggggatgctgatcctggccctcgggttatccatgggtgccaactgcgggattccactcaaccctgcccgggacctgggcccacgtctcttcacctacgtggctggctggggtcctgaagtcttcagtgctggtaatggctggtggtgggtgcctgtggtggcccctctggtgggggccaccgttggcacagccacttaccagctgttggtggctctgcaccaccctgagggcccagagccagctcaggatctggtgtctgctcaacacaaagcctcagagttggaaactcctgcctcagctcagatgctggagtgtaagctatgattaggacaaccctcacttcactcatggaccctggagccagccactgaccccgcctgggaacaacagwcattcttcctctttgttaatgtgccagaacctgggaggcttctctgtttatctgtttggcatcccttcctcctaaactaagaaggatcctggacagggagaagtggaggaggataaggtaccaggactcaggcttctcatcccctcctcccgcaaagcggttttctgaccctcagggcctctcggaatgtagttgctcgaggtaaccgctagagggtgcgcacctggatgctggatggggacggctgcgggcatctgcagggtggagggggccaccatccagtgtagggcacaaccctggggactgccctccatagcctgtcccgactgccgactcctagctctcatcgcctcggcgcctcccaccttcaccctctcggggatgcctccccaagagggtagttaggggtggggaagccgcctccacccagggggcgtggtgggggcggagggaaggagggcggcggggcacagagacagagagcaaggctgtgaaactgaggcaccgttcctagacatctcggtgctgtgtcgttcattcaaggagagttgagatacagtgaaatgagccagggcgaggagggagggtgaaggaacggagggcgggcggctccgaggagcgagagtcgggctgagggcaacctggcgccagggaaaattctggttattcaccacttctacagctctcctgccgctccctgcagaggatgctcgttttgcagagaaggcagtgttcctctattcccttcttccgaattaaaaataccccctcagagcg

SEQ ID NO: 92 - DNA, 2265 bp, Homo sapiens
agacagagggagcagtgaatagcaatagggtgtttccaccatggtcttcactcaggccccggctgaaatcatgggccacctccrgatacgcagcctcctggcccggcagtgcctggcagagtttctgggtgtgtttgtactcatgctcctcacccaaggagctgtggcccaggctgtcaccagtggagaaaccaaaggcaacttcttcaccatgtttctggctggctctctggccgttacgatagccatctacgtgggtggtaacgtctcaggggcccacctgaatccagccttctccctggccatgtgcatcgttggacgcctcccctgggtcaagctccccatttacatcttggtgcagttgctgtctgctttctgtgcttcgggagccacctatgttctctacyaygatgccctacagaactatacaggtgggaacctgacagtgactggccccaaggagacagcctccatttttgccacctatcctgccccctatctgtccctgaacaatggcttcctggatcaggttctgggcacygggatgctgattgtggggctcttggccatcctggacagacggaacaagggagtccctgcgggtctggagcctgtggtggtggggatgctgatcctggccctcgggttatccatgggtgccaactgcgggattccactcaaccctgcccgggacctgggcccacgtctcttcacctacgtggctggctggggtcctgaagtcttcaggtgggagacagactctcctggtgctggcctccactcaccttcctctgctaagggctctgtccctgggtccacagcactctgcctttaaaatagctctcttggcttcttaggacagtgttctttctccaagtcatattctccccctttctcccttgcttccctcccaacttttcactgaaacagtaagatttagaggttgtgttcttaggcatgccacattacttccatgcacattagtgacttcatcagcaaaattaatatattcagataattccctaaggcaagaggctggaccaagctctcctggggttccctcttctaaatactatgctttggtgacaaggcaatcctcttcctggtgtctaccaccctgggaacaactttagggcactctcttgttactgccccccgtccttggagaggggaaggctaagggagtcactcctgataccttcccactgtccttcttttgcagtgctggtaatggctggtggtgggtgcctgtggtggcccctctggtgggggccaccgttggcacagccacttaccagctgttggtggctctgcaccaccctgagggcccagagccagctcaggatctggtgtctgctcaacacaaagcctcagagttggaaactcctgcctcagctcagatgctggagtgtaagctatgattaggacaaccctcacttcactcatggaccctggagccagccactgaccccgcctgggaacaacagwcattcttcctctttgttaatgtgccagaacctgggaggcttctctgtttatctgtttggcatcccttcctcctaaactaagaaggatcctggacagggagaagtggaggaggataaggtaccaggactcaggcttctcatcccctcctcccgcaaagcggttttctgaccctcagggcctctcggaatgtagttgctcgaggtaaccgctagagggtgcgcacctggatgctggatggggacggctgcgggcatctgcagggtggagggggccaccatccagtgtagggcacaaccctggggactgccctccatagcctgtcccgactgccgactcctagctctcatcgcctcggcgcctcccaccttcaccctctcggggatgcctccccaagagggtagttaggggtggggaagccgcctccacccagggggcgtggtgggggcggagggaaggagggcggcggggcacagagacagagagcaaggctgtgaaactgaggcaccgttcctagacatctcggtgctgtgtcgttcattcaaggagagttgagatacagtgaaatgagccagggcgaggagggagggtgaaggaacggagggcgggcggctccgaggagcgagagtcgggctgagggcaacctggcgccagggaaaattctggttattcaccacttctacagctctcctgccgctccctgcagaggatgctcgttttgcagagaaggcagtgttcctctattcccttcttccgaattaaaaataccccctcagagcg

SEQ ID NO: 93 - DNA, 1651 bp, Homo sapiens
cagtgaatagcaatagggtgtttccaccatggtcttcactcaggccccggctgaaatcatgggccacctccrgatacgcagcctcctggcccggcagtgcctggcagagtttctgggtgtgtttgtactcatggggcccacctgaatccagccttctccctggccatgtgcatcgttggacgcctcccctgggtcaagctccccatttacatcttggtgcagttgctgtctgctttctgtgcttcgggagccacctatgttctctacyaygatgccctacagaactatacaggtgggaacctgacagtgactggccccaaggagacagcctccatttttgccacctatcctgccccctatctgtccctgaacaatggcttcctggatcaggttctgggcacygggatgctgattgtggggctcttggccatcctggacagacggaacaagggagtccctgcgggtctggagcctgtggtggtggggatgctgatcctggccctcgggttatccatgggtgccaactgcgggattccactcaaccctgcccgggacctgggcccacgtctcttcacctacgtggctggctggggtcctgaagtcttcagtgctggtaatggctggtggtgggtgcctgtggtggcccctctggtgggggccaccgttggcacagccacttaccagctgttggtggctctgcaccaccctgagggcccagagccagctcaggatctggtgtctgctcaacacaaagcctcagagttggaaactcctgcctcagctcagatgctggagtgtaagctatgattaggacaaccctcacttcactcatggaccctggagccagccactgaccccgcctgggaacaacagwcattcttcctctttgttaatgtgccagaacctgggaggcttctctgtttatctgtttggcatcccttcctcctaaactaagaaggatcctggacagggagaagtggaggaggataaggtaccaggactcaggcttctcatcccctcctcccgcaaagcggttttctgaccctcagggcctctcggaatgtagttgctcgaggtaaccgctagagggtgcgcacctggatgctggatggggacggctgcgggcatctgcagggtggagggggccaccatccagtgtagggcacaaccctggggactgccctccatagcctgtcccgactgccgactcctagctctcatcgcctcggcgcctcccaccttcaccctctcggggatgcctccccaagagggtagttaggggtggggaagccgcctccacccagggggcgtggtgggggcggagggaaggagggcggcggggcacagagacagagagcaaggctgtgaaactgaggcaccgttcctagacatctcggtgctgtgtcgttcattcaaggagagttgagatacagtgaaatgagccagggcgaggagggagggtgaaggaacggagggcgggcggctccgaggagcgagagtcgggctgagggcaacctggcgccagggaaaattctggttattcaccacttctacagctctcctgccgctccctgcagaggatgctcgttttgcagagaaggcagtgttcctctattcccttcttccgaattaaaaataccccctcagagcg

SEQ ID NO: 94 - DNA, 4726 bp, Homo sapiens
ccgaaactgacacaaagtagcgggccgaggccccgggggagcggggccgcagctgggggggcgggagcccgtggggagccgagccgagcgccccccgccccagcccccggcatgggcagtacggggccgccggggcgggcgccgagcgctgagcgctgagggtctcccatgggattgctgggatcttgctgggtgagatggcagtgtgygcaaaaaagcgccccccagaagaagaaaggagggcgcgggsyaatgaccgagaatacaatgagaaattccagtatgcgagtaactgcatcaagacctccaagtacaatattctcaccttcctgcctgtcaacctctttgagcagttccaggaagttgccaacacttacttcctgttcctcctcattctgcagttgatcccccagatctcttccctgtcctggttcaccaccattgtgcctttggttcttgtcctcaccatcacagctgttaaagatgccactgatgactatttccgccacaagagcgataaccaggtgaataaccgccagtctcrggtgctgatcaayggaatcctccagcaggagcagtggatgaatgtctgtgttggtgatattatcaagctagaaaataaccagtttgtggcggctgtagactggaccttaagcagtggaattcttgtctcctgttcaggtgaagtgatctgtgaacctcccaacaacaaactggacaaattcagcggaaccctstactggaaggaaaataagttccctctgagcaaccagaacatgctgctgcggggctgtgtgctgcgaaacaccgagtggtgcttcgggctggtcatctttgcaggtcccgacactaagctgatgcaaaacagcggcagaacaaagttcaaaagaacgagtatcgatcgcctaatgaataccctggtgctctggatttttggattcctggtttgcatgggggtgatcctggccattggcaatgccatctgggagcacgaggtggggatgcgtttccaggtctacctgccgtgggatgaggcagtggacagtgccttcttctctggcttcctctccttctggtcctacatcatcatcctcaacaccgttgtgcccatttcactctatgtcagtgtggaggtcatccgtctgggccacagctacttcatcaactgggataagaagatgttctgcatgaagaagcggacgcctgcagaagcccgcaccaccaccctaaaygaggagctgggccaggtggagtacatcttctccgacaagacgggcaccctcacccagaacatcatggttttcaacaagtgctccatcaatggccacagctatggtgatgtgtttgacgtcctgggacacaaagctgaattgggagagaggcctgaacctgttgacttctccttcaatcctctggctgacaagaagttcttattttgggaccccagcctgctggaggctgtcaagatcggggacccccacacgcatgagttcttccgcctcctttccctgtgtcatactgtcatgtcagaagaaaagaacgaaggagagctgtactacaaagctcagtccccagatgagggggccctggtcaccgcagccaggaactttggttttgttttccgctctcgcacccccaaaacaatcaccgtccatgagatgggcacagccatcacctaccagctgctggccatcctggacttcaacaacatccgcaagcggatgtcggtcatagkgcggaatccagaggggaagatccgactctactgcaaaggggctgacactatcctactggacagactgcaccactccactcaagagctgctcaacaccaccatggaccaccttaatgagtacgcaggggaagggctgaggaccctggtgctggcctacaaggatctggatgaagagtactaygaggagtgggctgagcgacgcctccaggccagcctggcccaggacagccgggaggacaggctggctagcatctatgaggaggttgagaacaacatgatgctgctgggtgcaacggccattgaggacaaacttcagcaaggggttccagagaccattgccctcctgacactggccaacatcaagatttgggtgctaaccggagacaagcaagagacggctgtgaacatcggctattcctgcaagatgctgacggatgacatgactgaggttttcatagtcactggccatactgtcctggaggtgcgggaggagctcaggaaagcccgggagaagatgatggactcatcccgctcygtaggcaacggcttcacctatcaggacaagctttcttcttccaagctaacttctgtcctggaggccgttgctggggagtacgccctggtcataaatggtcacagcctggcccacgcactggaggcagacatggagctggagtttctggagacagcgtgtgcctgcaaagctgtcatctgctgccgggtgacccccttgcagaaggcacaggtggtagaactggtcaagaagtacaagaaggctgtgacgcttgccattggagacggagccaatgatgtcagcatgatcaaaacggctcacattggtgtggggatcagtgggcaggaagggatccaggctgtcttggcctccgattactccttctcccagttcaagttcctgcagcgcctcctgctggtgcatgggcgctggtcctacctgcgaatgtgcaagtttctttgctatttcttctacaaaaactttgctttcaccatggtccacttctggtttggcttcttctgtggcttctcagcccagaccgtctatgaccagtatttcatcaccctgtataacatcgtgtacacctccctgccagtcctggctatgggggtctttgatcaggatgtccccgagcagcggagcatggagtaccctaagctgtatgagccgggccagctgaaccttctcttcaacaagcgggagttcttcatctgcatcgcccagggcatctacacctccgtgctcatgttcttcattccctatggggtgtttgctgatgccacccgggatgatggcactcagctggctgactaccagtcctttgcagtcactgtggccacatccttggtcattgtggttagcgtgcagattgggctcgacacaggctactggacggccatcaaccacttcttcatctggggaagccttgctgtttactttgccatcctctttgccatgcacagcaatgggctcttcgacatgtttcccaaccagttccggtttgtggggaatgcccagaacaccttggcccagcccacggtgtggctgaccattgtgctcaccacrgtcgtctgcatcatgcccgtggttgccttccgattcctcaggctcaacctgaagccggatctctccgacacggtccgctacacacagctcgtgaggaagaagcagaaggcccagcaccgctgcatgcggcgggttggccgcactggctcccggcgctccggctatgccttctcccatcaggagggcttcggggagctcatcatgtctggcaagaacatgcggctgagctctctcgcgctctccagcttcaccacccgctccagctccagctggattgagagcctgcgcaggaagaagagtgacagtgccagtagccccagtggcggtgccgacaagcccctcaagggctgaaggccgaggatggatgccctgtgccagtgaccagagcacccagggctggccagtcactgagggaacagygtctcggaactgctggtcctcattccttgcttcccgtccccccggtagactctgtcctgctggtcccaccacacatggctgggacatctgttcccagctgtaggcccttccaccagctggggagctagagggagcaggyccaagggcagagcagaggctgaggcacggggagccagccccactcggggaccagaagtggaaccaaaaacaagaaaaaactgtgagagattgtgtctgcccctgccctgcctgggacccacagggagactataatctccttatttttttactcctactccccagaggggccctagtgcctctgttcctgaattacataagaatgtaccatgccgggaagccagagacctgcaggggcctcggcccctcacatcgtgtatgtctctccttgatttgtgttgtgtccagtttggttttgtctttttttatttggcaagtggaggaggcttttatgtgacttttatgttgtggttggtgtcttaactctcctgggaaaaggaggctggcacacactgggatgccgcagcctggccggctgtggggtggtttgggaggatccatgtcggctctgcctgcagtgaccagtgctctgtggggcagaggagctgaccagggagggaggtacccatgagcagagggtagtgggagagtgtaaaggagggtttggtcctgtctgcttcctcaccttgagagtaaagtgctgccctctgcccccaacacacacacatatcaattcctggattccttagtcctgctggccttgggctggagcctaggaaagtggcccccaaatccttagtgagctaaagctgggtctgaaatttggtcagtggggaggggtagttttcttttcttttttctttttctttttttctttttttttttgagatggagtctcactcttgtcacctaggcaagagtgcaatggcacaatctcagctcactgcaacctccacctcctgggttcaagcgat

SEQ ID NO: 95 - DNA, 1143 bp, Homo sapiens
atgacggtccccaaggagatgcccgagaagtgggcccgggcccaggcgcctccctcttggagccgaaagaagccctcttgggggacagaagaagaaaggagggcgcgggsyaatgaccgagaatacaatgagaaattccagtatgcgagtaactgcatcaagacctccaagtacaatattctcaccttcctgcctgtcaacctctttgagcagttccaggaagttgccaacacttacttcctgttcctcctcattctgcagttgatcccccagatctcttccctgtcctggttcaccaccattgtgcctttggttcttgtcctcaccatcacagctgttaaagatgccactgatgactatttccgccacaagagcgataaccaggtgaataaccgccagtctcrggtgctgatcaayggaatcctccagcaggagcagtggatgaatgtctgtgttggtgatattatcaagctagaaaataaccagtttgtggcggcggatctcctcctcctttccagcagtgagccccatgggctgtgttacatagagacagcagaacttgatggcgagaccaacatgaaagtacgtcaggcgattccagtcacctcagaattgggagacatcagtaagcttgccaagtttgacggtgaagtgatctgtgaacctcccaacaacaaactggacaaattcagcggaaccctstactggaaggaaaataagttccctctgagcaaccagaacatgctgctgcggggctgtgtgctgcgaaacaccgagtggtgcttcgggctggtcatctttgcaggtcccgacactaagctgatgcaaaacagcggcagaacaaagttcaaaagaacgagtatcgatcgcctaatgaataccctggtgctctggatttttggattcctggtttgcatgggggtgatcctggccattggcaatgccatctgggagcacgaggtggggatgcgtttccaggtctacctgccgtgggatgaggcagtggacagtgccttcttctctggcttcctctccttctggtcctacatcatcatcctcaacaccgttgtgcccatttcactctatgtcagtcctgagtgtggaggtcatccgtctgggccacagctacttcatcaactggga

SEQ ID NO: 96 - DNA, 4753 bp, Homo sapiens
ccgaaactgacacaaagtagcgggccgaggccccgggggagcggggccgcagctgggggggcgggagcccgtggggagccgagccgagcgccccccgccccagcccccggcatgggcagtacggggccgccggggcgggcgccgagcgctgagcgctgagggtctcccatgggattgctgggatcttgctgggtgagatggcagtgtgygcaaaaaagcgccccccagaagaagaaaggagggcgcgggsyaatgaccgagaatacaatgagaaattccagtatgcgagtaactgcatcaagacctccaagtacaatattctcaccttcctgcctgtcaacctctttgagcagttccaggaagttgccaacacttacttcctgttcctcctcattctgcagttgatcccccagatctcttccctgtcctggttcaccaccattgtgcctttggttcttgtcctcaccatcacagctgttaaagatgccactgatgactatttccgccacaagagcgataaccaggtgaataaccgccagtctcrggtgctgatcaayggaatcctccagcaggagcagtggatgaatgtctgtgttggtgatattatcaagctagaaaataaccagtttgtggcggctgtagactggaccttaagcagtggaattcttgtctcctgttcaggtgaagtgatctgtgaacctcccaacaacaaactggacaaattcagcggaaccctstactggaaggaaaataagttccctctgagcaaccagaacatgctgctgcggggctgtgtgctgcgaaacaccgagtggtgcttcgggctggtcatctttgcaggtcccgacactaagctgatgcaaaacagcggcagaacaaagttcaaaagaacgagtatcgatcgcctaatgaataccctggtgctctggatttttggattcctggtttgcatgggggtgatcctggccattggcaatgccatctgggagcacgaggtggggatgcgtttccaggtctacctgccgtgggatgaggcagtggacagtgccttcttctctggcttcctctccttctggtcctacatcatcatcctcaacaccgttgtgcccatttcactctatgtcagtgtggaggtcatccgtctgggccacagctacttcatcaactgggataagaagatgttctgcatgaagaagcggacgcctgcagaagcccgcaccaccaccctaaaygaggagctgggccaggtggagtacatcttctccgacaagacgggcaccctcacccagaacatcatggttttcaacaagtgctccatcaatggccacagctatggtgatgtgtttgacgtcctgggacacaaagctgaattgggagagaggcctgaacctgttgacttctccttcaatcctctggctgacaagaagttcttattttgggaccccagcctgctggaggctgtcaagatcggggacccccacacgcatgagttcttccgcctcctttccctgtgtcatactgtcatgtcagaagaaaagaacgaaggagagctgtactacaaagctcagtccccagatgagggggccctggtcaccgcagccaggaactttggttttgttttccgctctcgcacccccaaaacaatcaccgtccatgagatgggcacagccatcacctaccagctgctggccatcctggacttcaacaacatccgcaagcggatgtcggtcatagkgcggaatccagaggggaagatccgactctactgcaaaggggctgacactatcctactggacagactgcaccactccactcaagagctgctcaacaccaccatggaccaccttaatgtgggtgagtacgcaggggaagggctgaggaccctggtgctggcctacaaggatctggatgaagagtactaygaggagtgggctgagcgacgcctccaggccagcctggcccaggacagccgggaggacaggctggctagcatctatgaggaggttgagaacaacatgatggaatccttgtggtattttcagctgctgggtgcaacggccattgaggacaaacttcagcaaggggttccagagaccattgccctcctgacactggccaacatcaagatttgggtgctaaccggagacaagcaagagacggctgtgaacatcggctattcctgcaagatgctgacggatgacatgactgaggttttcatagtcactggccatactgtcctggaggtgcgggaggagctcaggaaagcccgggagaagatgatggactcatcccgctcygtaggcaacggcttcacctatcaggacaagctttcttcttccaagctaacttctgtcctggaggccgttgctggggagtacgccctggtcataaatggtcacagcctggcccacgcactggaggcagacatggagctggagtttctggagacagcgtgtgcctgcaaagctgtcatctgctgccgggtgacccccttgcagaaggcacaggtggtagaactggtcaagaagtacaagaaggctgtgacgcttgccattggagacggagccaatgatgtcagcatgatcaaaacggctcacattggtgtggggatcagtgggcaggaagggatccaggctgtcttggcctccgattactccttctcccagttcaagttcctgcagcgcctcctgctggtgcatgggcgctggtcctacctgcgaatgtgcaagtttctttgctatttcttctacaaaaactttgctttcaccatggtccacttctggtttggcttcttctgtggcttctcagcccagaccgtctatgaccagtatttcatcaccctgtataacatcgtgtacacctccctgccagtcctggctatgggggtctttgatcaggatgtccccgagcagcggagcatggagtaccctaagctgtatgagccgggccagctgaaccttctcttcaacaagcgggagttcttcatctgcatcgcccagggcatctacacctccgtgctcatgttcttcattccctatggggtgtttgctgatgccacccgggatgatggcactcagctggctgactaccagtcctttgcagtcactgtggccacatccttggtcattgtggttagcgtgcagattgggctcgacacaggctactggacggccatcaaccacttcttcatctggggaagccttgctgtttactttgccatcctctttgccatgcacagcaatgggctcttcgacatgtttcccaaccagttccggtttgtggggaatgcccagaacaccttggcccagcccacggtgtggctgaccattgtgctcaccacrgtcgtctgcatcatgcccgtggttgccttccgattcctcaggctcaacctgaagccggatctctccgacacggtccgctacacacagctcgtgaggaagaagcagaaggcccagcaccgctgcatgcggcgggttggccgcactggctcccggcgctccggctatgccttctcccatcaggagggcttcggggagctcatcatgtctggcaagaacatgcggctgagctctctcgcgctctccagcttcaccacccgctccagctccagctggattgagagcctgcgcaggaagaagagtgacagtgccagtagccccagtggcggtgccgacaagcccctcaagggctgaaggccgaggatggatgccctgtgccagtgaccagagcacccagggctggccagtcactgagggaacagygtctcggaactgctggtcctcattccttgcttcccgtccccccggtagactctgtcctgctggtcccaccacacatggctgggacatctgttcccagctgtaggcccttccaccagctggggagctagagggagcaggyccaagggcagagcagaggctgaggcacggggagccagccccactcggggaccagaagtggaaccaaaaacaagaaaaaactgtgagagattgtgtctgcccctgccctgcctgggacccacagggagactataatctccttatttttttactcctactccccagaggggccctagtgcctctgttcctgaattacataagaatgtaccatgccgggaagccagagacctgcaggggcctcggcccctcacatcgtgtatgtctctccttgatttgtgttgtgtccagtttggttttgtctttttttatttggcaagtggaggaggcttttatgtgacttttatgttgtggttggtgtcttaactctcctgggaaaaggaggctggcacacactgggatgccgcagcctggccggctgtggggtggtttgggaggatccatgtcggctctgcctgcagtgaccagtgctctgtggggcagaggagctgaccagggagggaggtacccatgagcagagggtagtgggagagtgtaaaggagggtttggtcctgtctgcttcctcaccttgagagtaaagtgctgccctctgcccccaacacacacacatatcaattcctggattccttagtcctgctggccttgggctggagcctaggaaagtggcccccaaatccttagtgagctaaagctgggtctgaaatttggtcagtggggaggggtagttttcttttcttttttctttttctttttttctttttttttttgagatggagtctcactcttgtcacctaggcaagagtgcaatggcacaatctcagctcactgcaacctccacctcctgggttcaagcgat

SEQ ID NO: 97 - DNA, 2751 bp, Homo sapiens
attcgccgctggactttgacagtggtcaaaggctctgctcagttctctgtgcctgtctccctccagcactgccgaggttctctgccgaggccaaccagaaataccccttggaagctggaatcctgcaacaatggcccagggtgtcctctggatcctactcggattgctactgtggtcagacccagggacagcctccctgcccctgctcatggactctgtcatccaggccctggctgagctggagcagaaagtgccagctgccaagrccagacacacagcttctgcgtggctgatgtcagctccaaactctggcccccacaatcgcctctaccacttcctgctgggggcatggagcctcaatgctacagagttggatccctgcccactaagcccagagctgttaggcctgaccaaggaggtggcccracatgacgtacgagaagggaaggaatatggggtggtgctggcacctgatggctcgaccgtggctgtggagcctctgctggcrgggctggaggcagggctgcaagggcgcagggtcatwaatttgcccttggacagcatggctgccccttgggagactggagatacctttccagatgttgtggccattgctccagatgtaagagccacctcctccccaggactcagggatggctctccagatgtcaccactgcagatattggagccaacactccagatgctacaaaaggctgtccagatgtccaagcttccttgccagatgccaaagccaagtccccaccgaccatggtggacagcctcctggcagtcaccctggctggaaacctgggcctgaccttcctccgaggttcccagacccagagccatccagacctgggaactgagggctgctgggaccagctctctgcccctcggamctttacgcttttggaccccaaggcatctctgttaaccawggccttcctcaatggcgccctggatggggtcatccttggagactacctgagccggactcctgagccccggccatccctcagccacttgctgagccagtactatggggctggggtggccagagacccmgggttccgcagcaacttccgacggcagaacggtgctgctctgacttcagcctccatsctggcccagcaggtgtggggaacccttgtccttctacagaggctggagccagtacacctccagcttcagtgcatgagccaagaacagctggcccaggtggctrccaatgctaccaaggaattcactgaggccttcctgggatgcccggccatccacccccgctgccgctggggagcggcgccttatcrgggccgcccgaagctgctgcagctgccgctgggattcttgtacgtgcatcacacctacgtgcctgcaccaccctgcacggacttcacgcgctgcgcagccaacatgcgctccatgcagcgctaccaccaggacacgcaaggctggggagacatcggctacagtttcgtggtgggctcggacggctacgtgtacgagggacgcggctggyactgggtgggcgcccacacgctcggccacaactccyggggcttcggcgtggccatagtgggcaactacaccgcggcgctgcccaccgaggccgctctgcgcacggtgcgcgacacgctcccgagttgtgcggtgcgcgccggcctcctgcggccagactacgcgctgctgggccaccgccagctggtgcgcaccgactgccccggcgacgcgctcttcgacctgctgcgcacctggccgcacttcaccgcggtgagtcttcgcagcctgcactacacggcccgccgcccctccgtctacacaagctccacgaggcccctgccccctgcctgtaacagctgtgcccgcacagcctcagccaggcccccaacttcccggcggcacgtctattcaggaaacctaggyccagcctttgcgggtcactctgcgggcaacatccctgatcctgtgacttctgcctatgcagcctcagctcagccccagacccagccagcctgtcctttycccagctcctaatacctctacctttccagccaaggcatggaccctgacacctgccaacagcccctctgccctcacaacctcagcctggccttcatgacttctctacscaagtcacaacctgtcaggctgcaccacctcatcctggcccgccgaaccttgacctcacccctgcccctacccgaaggccctctgtccacacaacatgaacctaggctgtgaccttttgccttcacaacctctgtccagtccttaatcctgtgttgcaattctctgtccagacaatctcaactctgaggttgcttgtttcgtccctgactccttaacccctgatgacaactcttatgccagcacaactttgacctgatgacctcatcccagcccttgatcgccatcactaaaacaattttagaatcacacctggacaatctcgtgctacctacatactgccactccatttcattaagctattgactagcacatccatctcggcctatagttggctttgtcctcactctctcactttgggccactgtcccctccctgatccagggttccaccaccaggagggcagacccagccacataccacaaccacccccaagcctcacactcccttgtctttttccagactgttaagccaagacctgccaggagtgtctctaagagatccaggagggagccacccccaaggaccctgccagccacagacctccaataaagacagcatgg

SEQ ID NO: 98 - DNA, 1876 bp, Homo sapiens
attcgccgctggactttgacagtggtcaaaggctctgctcagttctctgtgcctgtctccctccagcactgccgaggttctctgccgaggccaaccagaaataccccttggaagctggaatcctgcaacaatggcccagggtgtcctctggatcctactcggattgctactgtggtcagacccagggacagcctccctgcccctgctcatggactctgtcatccaggccctggctgagctggagcagaaagtgccagctgccaagrccagacacacagcttctgcgtggctgatgtcagctccaaactctggcccccacaatcgcctctaccacttcctgctgggggcatggagcctcaatgctacagagttggatccctgcccactaagcccagagctgttaggcctgaccaaggaggtggcccracatgacgtacgagaagggaaggaatatggggtggtgctggcacctgatggctcgaccgtggctgtggagcctctgctggcrgggctggaggcagggctgcaagggcgcagggtcatwaatttgcccttggacagcatggctgccccttgggagactggagatacctttccagatgttgtggccattgctccagatgtaagagccacctcctccccaggactcagggatggctctccagatgtcaccactgcagatattggagccaacactccagatgctacaaaaggctgtccagatgtccaagcttccttgccagatgccaaagccaagtccccaccgaccatggtggacagcctcctggcagtcaccctggctggaaacctgggcctgaccttcctccgaggttcccagacccagagccatccagacctgggaactgagggctgctgggaccagctctctgcccctcggamctttacgcttttggaccccaaggcatctctgttaaccawggccttcctcaatggcgccctggatggggtcatccttggagactacctgagccggactcctgagccccggccatccctcagccacttgctgagccagtactatggggctggggtggccagagacccmgggttccgcagcaacttccgacggcagaacggtgctgctctgacttcagcctccatsctggcccagcaggtgtggggaacccttgtccttctacagaggctggagccagtacacctccagcttcagtgcatgagccaagaacagctggcccaggtggctrccaatgctaccaaggaattcactgaggccttcctgggatgcccggccatccacccccgctgccgctggggagcggcgccttatcrgggccgcccgaagctgctgcagctgccgctgggattcttgtacgtgcatcacacctacgtgcctgcaccaccctgcacggacttcacgcgctgcgcagccaacatgcgctccatgcagcgctaccaccaggacacgcaaggctggggagacatcggctacagtttcgtggtgggctcggacggctacgtgtacgagggacgcggctggyactgggtgggcgcccacacgctcggccacaactccyggggcttcggcgtggccatagtgggcaactacaccgcggcgctgcccaccgaggccgctctgcgcacggtgcgcgacacgctcccgagttgtgcggtgcgcgccggcctcctgcggccagactacgcgctgctgggccaccgccagctggtgcgcaccgactgccccggcgacgcgctcttcgacctgctgcgcacctggccgcacttcaccgcgactgttaagccaagacctgccaggagtgtctctaagagatccaggagggagccacccccaaggaccctgccagccacagacctccaataaagacagcatggaaac

SEQ ID NO: 99 - DNA, 2252 bp, Homo sapiens
aattctcgcccaaggacagacctgaatctctagctgcctagaggctgactcaactgaaatcatggcgtttgacagcacttggaaggtagaccggagtgaaaactatgacaagttcatggaaaaaatgggtgttaatatagtgaaaaggaagcttgcagctcatgacaatttgaagctgacaattacacaagaaggaaataaattcacagtcaaagaatcaagcrcttttcgaaacattgaagttgtttttgaacttggtgtcacctttaattacaayctagcagacggaactgaactcagggggacctggagccttgagggaaataaacttattggaaaattcaaacggacagacaatggaaacgaactgaatactgtccgagaaattataggtgatgaactagtccagacttatgtrtatgaaggagtagaagccaaaaggatctttaaaaaggattgagcattattcttggcrcacagtccaaaatacaaattggacagaagatctatattgtaccagaactrtttatttcaccccatcaagtataaggttactgattgattggtccttttataaacattggtatatttccattcatgccaaagcaaaagaagtaaaagctaattaggatttaatttgttttatattctctaagatatatatttactaaaagaatttgtgacattttaaaaaacaaaaataaatattgcrtccatgttgctttatatgtagccttgccttttaaaagaaaaagtatgtgaatatgaattgacagaytgttttcgtagagagagggtcttactctttcactcaggctggaatgyagtggagagatcatagctcactgtaacctcaaactcctggactcatgcaatcttcctgcctcaggcttctgagtagctaggactatgggtacattccacagtgcccagctaatttttgttttgttttctttttattttttttagagatggggtcttgctatattgcccaggctggtcttgaacccctggcctcaagcaatcctcctgcctcagcctctcaagttgttttttttctttacatttgataaactaaaagcataggctgcatatgagtctttaacatcttgaactggttgtgaataattttctggcactggttgtaagtaatatctattattataaaaataatatatgctcaaccagaaaacttagaaataagaaacacaaatgtaaaataagtatttccataactcataatccagagataattgccattctgattttgatagatatcctctcagctctcttccctgggggcagatatttcccaatacataccactttgaataggatgataggaaataaatgatgtactacattaaattaaattattgtattacatttttgtacacatcagtcattcccasgcttggctgaaaatcaggatcatctgagaaacttaaacaatttctgcattcttaatctccactgttattctattatatcagaatcgctaatagaaccaagaattctagaaaatttcctggtgattctgatgcagcctgtccactaacttgtctttgagaacaatggagayatcagttatcaatgttatttttaaccacccccttcttttttgttgttgtgggttttttcacataaacacatacattgccaattttccagggctcaaaaagtttccttttattcatattttcacatgacgtaaaattttatgtgcttcacataattktattttagcagggtacatattaggggatggagaggggktamaatttttaagcatttgcagctgcaactctatagacttttgacaaattctttttcacactgatgtagataacagcttaacatttacatagttcttackacttgccacacactgttctaagtggtatatacatatgacatatatattaaaatgtaggaagaaaaatgtttgagtacctgatgaaaatgaatagagagtatgtaatctttgaaagstgaatactgygtgttctcacttataagtgggagctaaataatgtatacacatggacacaccagagtgtagaataatagacactggagacttggaagagttggagggttggcagggggcgatgataatttacttaatgggtacaatgtacattattcagggggtgatggttacagcccagactttaccactatgcaatatatcaatgtaacaaaactatacttgtactccttaaatttatataaaaataccttaaatctat

SEQ ID NO: 100 - DNA, 2861 bp, Homo sapiens
gtggtggccagrgctgccgtggcaaaatgagctgtcaactttaggttgacaggggtgtggccgcgaccgcaagggcttttgttgccgggtggacccaacagggatgggctgctggggacagctgctggtgtggttcggagccgcgggcgccacctacgttttccgggtacgtgctcccttcggcgctcagcgttggggtcccaatcctctccccaggggcgctcacgcaccggctctccgtccgtcccttggggtccccctatcccygcgctgggctgggctggcctgggctgggctgggggcccctgcccttatccaggccccctgggcgggagccctctcccagtggcagtgcccctggacagctggagggcgcttcctggamcacgccgctggccccacaggtgcgcgctggcgagctggaacygttgctggtggcggccggaggcggcggtcgggcctacctgaggccgcrggaccgaggccggactcaggcctcccccgagaaactggagaaccgctcggaggcgcccgggagcggcgggagaggcggggcggcagggggcgacgcttcagagactgacaacctctgggctgatggggaagatggagtatccttcatacaccccagcagcgagctcttcctgcagcctctggcagtcaccgagaaccacggagaggtagagatccgaaggcacctcaactgcagtcactgccctttgagagactgccaatggcaggcagagctccagctggctgaatgcctgtgcccagaaggcatggagctagctgtggataacgtcacctgcatggacctgcayaagcccccaggccctctggttctgatggtggctgtggtggcaacctcaacactgagcctccttatggtgtgtggggtcctgattctgggtacgaagcgtctagcaggcacagttgattcaaggctgctcctctccartgagctgggatgggtttctgcggggtcccggggctgacttcaagaccactcaccgcagcagagccgtggtagactcctctgggattctaagataggaaggagctggggaggcctggggaaaacgtttaccttaatgagcatctggaggggtgtcctgggcaggtgggggagggagagttgatgggcaggtggagggtgtgccgttattcttcccacccccagtgaagcagaagaagtggcagggcctgcaggagatgaggctgccgagccctgagcttgagctgagcaagcttcgaacctctgccatcaggacagcccccaatccctattattgccaggtggggcttggcccggcccagtcctggcctctgccaccaggtgtcaccgaggtttccccagccaatgttactctgctcagagccctgggccatggtgcctttggggaggtgtatgagggactggtaattggccttcctgggractccagtcccctgcaggtagctatcaagaccctgccagaactctgctcgcctcaggatgagctggatttcctcatggaggccctcatcatcagcaagtttcgccatcagaacattgtgcggtgtgtggggctcagcctcagggccacccctcgcctcattctgctggaactgatgtctggaggggacatgaagagtttcctgaggcacagtcggccacacctgggccagccatcacctctggtcatgcgggacctgctgcaactggcccaggacatagcccagggctgccactacctggaggaaaatcacttcatccacagggatattgccgcccggaactgcctgctgagctgcgctggacccagccgagtggccaagattggggactttgggatggcacgagatatctaccgggccagttattaccgcaggggggaccgggccttgctcccagtcaagtggatgcccccagaggccttcctggagggcatcttcacatccaagacagattcctrgtcttttggggtgctgctctgggagatcttctcactgggctacatgccctatcctgggcgcaccaaccaggaggtgctggacttcgtcgttggaggaggccggatggaccctcctaggggctgcccagggcctgtgtgagttgagtgctgcccgggaagggaggtccttcacaaccatgggtgggcatgaactcctgcctctccccaggtaccgcatcatgacccagtgttggcagcacgagcctgagctccgccctagctttgccagcatcttggagcgtctgcagtactgcactcaggacccggatgtgctgaattcactcctgccaatggagctggggcccaccccagaggaggaagggacttctgggctggggaacagatctttggagtgcctaagacccccacagccccaggaactgagtccagagaagttgaaaagctggggaggtagccctcttggcccctggctgtcctctggcctcaagcccctcaaatccaggggcctccaacctcagaacctttggaatcccacttatcgctcctgagccccaaggggccctgagggtaaggactgaggcactgagggtccctccctatactcctcaggctcctgggtggcctgttatgccagcggcctctgttccctgcagtctgtgctgtgtgtctgggcctgtctcggggctggcctggcagcgctgcacttgccatgctggaaaccagcccaggcctcccagggaagggcccagccacttccagcttttgatcttggggccagaggccgccttacacacaccccaggtgtccatggggagcactggattgctctcccattatgagcrtccttcatctgggcagaccccccaccctgcagatgcttctaataaaaagctcttctcatcctcc

SEQ ID NO: 101 - DNA, 2940 bp, Homo sapiens
aggtgggcgtggccagaccagctttaggtccggggagtgtctcgccagcggcagcacacccctgtaagtggtggccagrgctgccgtggcaaaatgagctgtcaactttaggttgacaggggtgtggccgcgaccgcaagggcttttgttgccgggtggacccaacagggatgggctgctggggacagctgctggtgtggttcggagccgcgggcgccattctctgctctagcccggggtcccaggagacttttctgcggtcctcgcccctgccgctggcaagtcccagcccccrggacccgaaagtcagcgccccgcctagtatcttggagccagcctccccgctgaattctccgggcaccgaggggtcttggctgttttctacctgcggggccagcggccggcatgggcccacacagacacaatgtgacggggcgtacgcggggaccagcgtggtggtgaccgtgggggccgccgggcagctgagaggcgtgcagctgtggcgcgtgccgggccctggccagtatctgatctcagcctacggagccgcgggcggcaaaggcgccaagaaccacctgtcgcgggcgcatggcgtcttcgtctcagcaatcttctccctcggtctcggggagtcgctgtacatcctggtggggcagcagggagaggacgcctgtcccggaggtagcccggagagccagctcgtctgcctcggggagtctcgagccgttgaagagcacgcggcgatggatgggagcgaaggggtcccggggtcgcggcgctgggcgggaggtggcgggggtggcgggggcgccacctacgttttccgggtgcgcgctggcgagctggaacygttgctggtggcggccggaggcggcggtcgggcctacctgaggccgcrggaccgaggccggactcaggcctcccccgagaaactggagaaccgctcggaggcgcccgggagcggcgggagaggcggggcggcagggggcgacgcttcagagactgacaacctctgggctgatggggaagatggagtatccttcatacaccccagcagcgagctcttcctgcagcctctggcagtcaccgagaaccacggagaggtagagatccgaaggcacctcaactgcagtcactgccctttgagagactgccaatggcaggcagagctccagctggctgaatgcctgtgcccagaaggcatggagctagctgtggataacgtcacctgcatggacctgcayaagcccccaggccctctggttctgatggtggctgtggtggcaacctcaacactgagcctccttatggtgtgtggggtcctgattctggtgaagcagaagaagtggcagggcctgcaggagatgaggctgccgagccctgagcttgagctgagcaagcttcgaacctctgccatcaggacagcccccaatccctattattgccaggtggggcttggcccggcccagtcctggcctctgccaccaggtgtcaccgaggtttccccagccaatgttactctgctcagagccctgggccatggtgcctttggggaggtgtatgagggactggtaattggccttcctgggractccagtcccctgcaggtagctatcaagaccctgccagaactctgctcgcctcaggatgagctggatttcctcatggaggccctcatcatcagcaagtttcgccatcagaacattgtgcggtgtgtggggctcagcctcagggccacccctcgcctcattctgctggaactgatgtctggaggggacatgaagagtttcctgaggcacagtcggccacacctgggccagccatcacctctggtcatgcgggacctgctgcaactggcccaggacatagcccagggctgccactacctggaggaaaatcacttcatccacagggatattgccgcccggaactgcctgctgagctgcgctggacccagccgagtggccaagattggggactttgggatggcacgagatatctaccgggccagttattaccgcaggggggaccgggccttgctcccagtcaagtggatgcccccagaggccttcctggagggcatcttcacatccaagacagattcctrgtcttttggggtgctgctctgggagatcttctcactgggctacatgccctatcctgggcgcaccaaccaggaggtgctggacttcgtcgttggaggaggccggatggaccctcctaggggctgcccagggcctgtgtaccgcatcatgacccagtgttggcagcacgagcctgagctccgccctagctttgccagcatcttggagcgtctgcagtactgcactcaggacccggatgtgctgaattcactcctgccaatggagctggggcccaccccagaggaggaagggacttctgggctggggaacagatctttggagtgcctaagacccccacagccccaggaactgagtccagagaagttgaaaagctggggaggtagccctcttggcccctggctgtcctctggcctcaagcccctcaaatccaggggcctccaacctcagaacctttggaatcccacttatcgctcctgagccccaaggggccctgagggtaaggactgaggcactgagggtccctccctatactcctcaggctcctgggtggcctgttatgccagcggcctctgttccctgcagtctgtgctgtgtgtctgggcctgtctcggggctggcctggcagcgctgcacttgccatgctggaaaccagcccaggcctcccagggaagggcccagccacttccagcttttgatcttggggccagaggccgccttacacacaccccaggtgtccatggggagcactggattgctctcccattatgagcrtccttcatctgggcagaccccccaccctgcagatgcttctaataaaaagctcttctcatcctcc

SEQ ID NO: 102 - DNA, 3421 bp, Homo sapiens
aggtgggcgtggccagaccagctttaggtccggggagtgtctcgccagcggcagcacacccctgtaagtggtggccagrgctgccgtggcaaaatgagctgtcaactttaggttgacaggggtgtggccgcgaccgcaagggcttttgttgccgggtggacccaacagggatgggctgctggggacagctgctggtgtggttcggagccgcgggcgccattctctgctctagcccggggtcccaggagacttttctgcggtcctcgcccctgccgctggcaagtcccagcccccrggacccgaaagtcagcgccccgcctagtatcttggagccagcctccccgctgaattctccgggcaccgaggggtcttggctgttttctacctgcggggccagcggccggcatgggcccacacagacacaatgtgacggggcgtacgcggggaccagcgtggtggtgaccgtgggggccgccgggcagctgagaggcgtgcagctgtggcgcgtgccgggccctggccagtatctgatctcagcctacggagccgcgggcggcaaaggcgccaagaaccacctgtcgcgggcgcatggcgtcttcgtctcagcaatcttctccctcggtctcggggagtcgctgtacatcctggtggggcagcagggagaggacgcctgtcccggaggtagcccggagagccagctcgtctgcctcggggagtctcgagccgttgaagagcacgcggcgatggatgggagcgaaggggtcccggggccccctgggcgggagccctctcccagtggcagtgcccctggacagctggagggcgcttcctggamcacgccgctggccccacaggtgcgcgctggcgagctggaacygttgctggtggcggccggaggcggcggtcgggcctacctgaggccgcrggaccgaggccggactcaggcctcccccgagaaactggagaaccgctcggaggcgcccgggagcggcgggagaggcggggcggcaggtggtgggggcggctggacgtcgcgggctccctctccgcaggccggccgctcactgcaggagggggcggagggcggccagggctgctccgaggcttgggcgacccttggctgggccgcggccggcggcttcgggggcggcggcggggcctgcactgcgggcggaggcggcggcggctacagggggggcgacgcttcagagactgacaacctctgggctgatggggaagatggagtatccttcatacaccccagcagcgagctcttcctgcagcctctggcagtcaccgagaaccacggagaggtagagatccgaaggcacctcaactgcagtcactgccctttgagagactgccaatggcaggcagagctccagctggctgaatgcctgtgcccagaaggcatggagctagctgtggataacgtcacctgcatggacctgcayaagcccccaggccctctggttctgatggtggctgtggtggcaacctcaacactgagcctccttatggtgtgtggggtcctgattctgggtacgaagcgtctagcaggcacagttgattcaaggctgctcctctccartgagctgggatgggtttctgcggggtcccggggctgacttcaagaccactcaccgcagcagagccgtggtagactcctctgggattctaagataggaaggagctggggaggcctggggaaaacgtttaccttaatgagcatctggaggggtgtcctgggcaggtgggggagggagagttgatgggcaggtggagggtgtgccgttattcttcccacccccagtgaagcagaagaagtggcagggcctgcaggagatgaggctgccgagccctgagcttgagctgagcaagcttcgaacctctgccatcaggacagcccccaatccctattattgccaggtggggcttggcccggcccagtcctggcctctgccaccaggtgtcaccgaggtttccccagccaatgttactctgctcagagccctgggccatggtgcctttggggaggtgtatgagggactggtaattggccttcctgggractccagtcccctgcaggtagctatcaagaccctgccagaactctgctcgcctcaggatgagctggatttcctcatggaggccctcatcatcagcaagtttcgccatcagaacattgtgcggtgtgtggggctcagcctcagggccacccctcgcctcattctgctggaactgatgtctggaggggacatgaagagtttcctgaggcacagtcggccacacctgggccagccatcacctctggtcatgcgggacctgctgcaactggcccaggacatagcccagggctgccactacctggaggaaaatcacttcatccacagggatattgccgcccggaactgcctgctgagctgcgctggacccagccgagtggccaagattggggactttgggatggcacgagatatctaccgggccagttattaccgcaggggggaccgggccttgctcccagtcaagtggatgcccccagaggccttcctggagggcatcttcacatccaagacagattcctrgtcttttggggtgctgctctgggagatcttctcactgggctacatgccctatcctgggcgcaccaaccaggaggtgctggacttcgtcgttggaggaggccggatggaccctcctaggggctgcccagggcctgtgtaccgcatcatgacccagtgttggcagcacgagcctgagctccgccctagctttgccagcatcttggagcgtctgcagtactgcactcaggacccggatgtgctgaattcactcctgccaatggagctggggcccaccccagaggaggaagggacttctgggctggggaacagatctttggagtgcctaagacccccacagccccaggaactgagtccagagaagttgaaaagctggggaggtagccctcttggcccctggctgtcctctggcctcaagcccctcaaatccaggggcctccaacctcagaacctttggaatcccacttatcgctcctgagccccaaggggccctgagggtaaggactgaggcactgagggtccctccctatactcctcaggctcctgggtggcctgttatgccagcggcctctgttccctgcagtctgtgctgtgtgtctgggcctgtctcggggctggcctggcagcgctgcacttgccatgctggaaaccagcccaggcctcccagggaagggcccagccacttccagcttttgatcttggggccagaggccgccttacacacaccccaggtgtccatggggagcactggattgctctcccattatgagcrtccttcatctgggcagaccccccaccctgcagatgcttctaataaaaagctcttctcatcctcc

SEQ ID NO: 103 - DNA, 3209 bp, Homo sapiens
aggtgggcgtggccagaccagctttaggtccggggagtgtctcgccagcggcagcacacccctgtaagtggtggccagrgctgccgtggcaaaatgagctgtcaactttaggttgacaggggtgtggccgcgaccgcaagggcttttgttgccgggtggacccaacagggatgggctgctggggacagctgctggtgtggttcggagccgcgggcgccattctctgctctagcccggggtcccaggagacttttctgcggtcctcgcccctgccgctggcaagtcccagcccccrggacccgaaagtcagcgccccgcctagtatcttggagccagcctccccgctgaattctccgggcaccgaggggtcttggctgttttctacctgcggggccagcggccggcatgggcccacacagacacaatgtgacggggcgtacgcggggaccagcgtggtggtgaccgtgggggccgccgggcagctgagaggcgtgcagctgtggcgcgtgccgggccctggccagtatctgatctcagcctacggagccgcgggcggcaaaggcgccaagaaccacctgtcgcgggcgcatggcgtcttcgtctcagcaatcttctccctcggtctcggggagtcgctgtacatcctggtggggcagcagggagaggacgcctgtcccggaggtagcccggagagccagctcgtctgcctcggggagtctcgagccgttgaagagcacgcggcgatggatgggagcgaaggggtcccggggccccctgggcgggagccctctcccagtggcagtgcccctggacagctggagggcgcttcctggamcacgccgctggccccacaggtgcgcgctggcgagctggaacygttgctggtggcggccggaggcggcggtcgggcctacctgaggccgcrggaccgaggccggactcaggcctcccccgagaaactggagaaccgctcggaggcgcccgggagcggcgggagaggcggggcggcaggtggtgggggcggctggacgtcgcgggctccctctccgcaggccggccgctcactgcaggagggggcggagggcggccagggctgctccgaggcttgggcgacccttggctgggccgcggccggcggcttcgggggcggcggcggggcctgcactgcgggcggaggcggcggcggctacaggggtaggtgcaccggggcgacgcttcagagactgacaacctctgggctgatggggaagatggagtatccttcatacaccccagcagcgagctcttcctgcagcctctggcagtcaccgagaaccacggagaggtagagatccgaaggcacctcaactgcagtcactgccctttgagagactgccaatggcaggcagagctccagctggctgaatgcctgtgcccagaaggcatggagctagctgtggataacgtcacctgcatggacctgcayaagcccccaggccctctggttctgatggtggctgtggtggcaacctcaacactgagcctccttatggtgtgtggggtcctgattctgggtacgaagcgtctagcaggcacagttgattcaaggctgctcctctccrtgaagcagaagaagtggcagggcctgcaggagatgaggctgccgagccctgagcttgagctgagcaagcttcgaacctctgccatcaggacagcccccaatccctattattgccaggtggggcttggcccggcccagtcctggcctctgccaccaggtgtcaccgaggtttccccagccaatgttactctgctcagagccctgggccatggtgcctttggggaggtgtatgagggactggtaattggccttcctgggractccagtcccctgcaggtagctatcaagaccctgccagaactctgctcgcctcaggatgagctggatttcctcatggaggccctcatcatcagcaagtttcgccatcagaacattgtgcggtgtgtggggctcagcctcagggccacccctcgcctcattctgctggaactgatgtctggaggggacatgaagagtttcctgaggcacagtcggccacacctgggccagccatcacctctggtcatgcgggacctgctgcaactggcccaggacatagcccagggctgccactacctggaggaaaatcacttcatccacagggatattgccgcccggaactgcctgctgagctgcgctggacccagccgagtggccaagattggggactttgggatggcacgagatatctaccgggccagttattaccgcaggggggaccgggccttgctcccagtcaagtggatgcccccagaggccttcctggagggcatcttcacatccaagacagattcctrgtcttttggggtgctgctctgggagatcttctcactgggctacatgccctatcctgggcgcaccaaccaggaggtgctggacttcgtcgttggaggaggccggatggaccctcctaggggctgcccagggcctgtgtaccgcatcatgacccagtgttggcagcacgagcctgagctccgccctagctttgccagcatcttggagcgtctgcagtactgcactcaggacccggatgtgctgaattcactcctgccaatggagctggggcccaccccagaggaggaagggacttctgggctggggaacagatctttggagtgcctaagacccccacagccccaggaactgagtccagagaagttgaaaagctggggaggtagccctcttggcccctggctgtcctctggcctcaagcccctcaaatccaggggcctccaacctcagaacctttggaatcccacttatcgctcctgagccccaaggggccctgagggtaaggactgaggcactgagggtccctccctatactcctcaggctcctgggtggcctgttatgccagcggcctctgttccctgcagtctgtgctgtgtgtctgggcctgtctcggggctggcctggcagcgctgcacttgccatgctggaaaccagcccaggcctcccagggaagggcccagccacttccagcttttgatcttggggccagaggccgccttacacacaccccaggtgtccatggggagcactggattgctctcccattatgagcrtccttcatctgggcagaccccccaccctgcagatgcttctaataaaaagctcttctcatcctcc

SEQ ID NO: 104 - DNA, 833 bp, Homo sapiens
aggtgggcgtggccagaccagctttaggtccggggagtgtctcgccagcggcagcacacccctgtaagtggtggccagrgctgccgtggcaaaatgagctgtcaactttaggttgacaggggtgtggccgcgaccgcaagggcttttgttgccgggtggacccaacagggatgggctgctggggacagctgctggtgtggttcggagccgcgggcgccattctctgctctagcccggggtcccaggagacttttctgcggtcctcgcccctgccgctggcaagtcccagcccccrggacccgaaagtcagcgccccgcctagtatcttggagccagcctccccgctgaattctccgggcaccgaggggtcttggctgttttctacctgcggggccagcggccggcatgggcccacacagacacaatgtgacggggcgtacgcggggaccagcgtggtggtgaccgtgggggccgccgggcagctgagaggcgtgcagctgtggcgcgtgccgggccctggccagtatctgatctcagcctacggagccgcgggcggcaaaggcgccaagaaccacctgtcgcgggcgcatggcgtcttcgtctcagcaatcttctccctcggtctcggggagtcgctgtacatcctggtggggcagcagggagaggacgcctgtcccggagtgagcgcagccagtggggatgggscggcgccggcgccgggggcgagggctgcctgggggccgggggagcgtgctttcctcggtgccgggtcaccagcacagcgaggggaggctcccgggccccgccgattccctcccccgctgcccgcaggg

SEQ ID NO: 105 - DNA, 2565 bp, Homo sapiens
gtggtggccagrgctgccgtggcaaaatgagctgtcaactttaggttgacaggggtgtggccgcgaccgcaagggcttttgttgccgggtggacccaacagggatgggctgctggggacagctgctggtgtggttcggagccgcgggcgccacctacgttttccgggtacgtgctcccttcggcgctcagcgttggggtcccaatcctctccccaggggcgctcacgcaccggctctccgtccgtcccttggggtccccctatcccygcgctgggctgggctggcctgggctgggctgggggcccctgcccttatccaggccccctgggcgggagccctctcccagtggcagtgcccctggacagctggagggcgcttcctggamcacgccgctggccccacaggtgcgcgctggcgagctggaacygttgctggtggcggccggaggcggcggtcgggcctacctgaggccgcrggaccgaggccggactcaggcctcccccgagaaactggagaaccgctcggaggcgcccgggagcggcgggagaggcggggcggcagggggcgacgcttcagagactgacaacctctgggctgatggggaagatggagtatccttcatacaccccagcagcgagctcttcctgcagcctctggcagtcaccgagaaccacggagaggtagagatccgaaggcacctcaactgcagtcactgccctttgagagactgccaatggcaggcagagctccagctggctgaatgcctgtgcccagaaggcatggagctagctgtggataacgtcacctgcatggacctgcayaagcccccaggccctctggttctgatggtggctgtggtggcaacctcaacactgagcctccttatggtgtgtggggtcctgattctgggtacgaagcgtctagcaggcacagttgattcaaggctgctcctctccrtgaagcagaagaagtggcagggcctgcaggagatgaggctgccgagccctgagcttgagctgagcaagcttcgaacctctgccatcaggacagcccccaatccctattattgccaggtggggcttggcccggcccagtcctggcctctgccaccaggtgtcaccgaggtttccccagccaatgttactctgctcagagccctgggccatggtgcctttggggaggtgtatgagggactggtaattggccttcctgggractccagtcccctgcaggtagctatcaagaccctgccagaactctgctcgcctcaggatgagctggatttcctcatggaggccctcatcatcagcaagtttcgccatcagaacattgtgcggtgtgtggggctcagcctcagggccacccctcgcctcattctgctggaactgatgtctggaggggacatgaagagtttcctgaggcacagtcggccacacctgggccagccatcacctctggtcatgcgggacctgctgcaactggcccaggacatagcccagggctgccactacctggaggaaaatcacttcatccacagggatattgccgcccggaactgcctgctgagctgcgctggacccagccgagtggccaagattggggactttgggatggcacgagatatctaccgggccagttattaccgcaggggggaccgggccttgctcccagtcaagtggatgcccccagaggccttcctggagggcatcttcacatccaagacagattcctrgtcttttggggtgctgctctgggagatcttctcactgggctacatgccctatcctgggcgcaccaaccaggaggtgctggacttcgtcgttggaggaggccggatggaccctcctaggggctgcccagggcctgtgtaccgcatcatgacccagtgttggcagcacgagcctgagctccgccctagctttgccagcatcttggagcgtctgcagtactgcactcaggacccggatgtgctgaattcactcctgccaatggagctggggcccaccccagaggaggaagggacttctgggctggggaacagatctttggagtgcctaagacccccacagccccaggaactgagtccagagaagttgaaaagctggggaggtagccctcttggcccctggctgtcctctggcctcaagcccctcaaatccaggggcctccaacctcagaacctttggaatcccacttatcgctcctgagccccaaggggccctgagggtaaggactgaggcactgagggtccctccctatactcctcaggctcctgggtggcctgttatgccagcggcctctgttccctgcagtctgtgctgtgtgtctgggcctgtctcggggctggcctggcagcgctgcacttgccatgctggaaaccagcccaggcctcccagggaagggcccagccacttccagcttttgatcttggggccagaggccgccttacacacaccccaggtgtccatggggagcactggattgctctcccattatgagcrtccttcatctgggcagaccccccaccctgcagatgcttctaataaaaagctcttctcatcctcc

SEQ ID NO: 106 - DNA, 3123 bp, Homo sapiens
aggtgggcgtggccagaccagctttaggtccggggagtgtctcgccagcggcagcacacccctgtaagtggtggccagrgctgccgtggcaaaatgagctgtcaactttaggttgacaggggtgtggccgcgaccgcaagggcttttgttgccgggtggacccaacagggatgggctgctggggacagctgctggtgtggttcggagccgcgggcgccattctctgctctagcccggggtcccaggagacttttctgcggtcctcgcccctgccgctggcaagtcccagcccccrggacccgaaagtcagcgccccgcctagtatcttggagccagcctccccgctgaattctccgggcaccgaggggtcttggctgttttctacctgcggggccagcggccggcatgggcccacacagacacaatgtgacggggcgtacgcggggaccagcgtggtggtgaccgtgggggccgccgggcagctgagaggcgtgcagctgtggcgcgtgccgggccctggccagtatctgatctcagcctacggagccgcgggcggcaaaggcgccaagaaccacctgtcgcgggcgcatggcgtcttcgtctcagcaatcttctccctcggtctcggggagtcgctgtacatcctggtggggcagcagggagaggacgcctgtcccggaggtagcccggagagccagctcgtctgcctcggggagtctcgagccgttgaagagcacgcggcgatggatgggagcgaaggggtcccggggtcgcggcgctgggcgggaggtggcgggggtggcgggggcgccacctacgttttccgggtgcgcgctggcgagctggaacygttgctggtggcggccggaggcggcggtcgggcctacctgaggccgcrggaccgaggccggactcaggcctcccccgagaaactggagaaccgctcggaggcgcccgggagcggcgggagaggcggggcggcaggtggtgggggcggctggacgtcgcgggctccctctccgcaggccggccgctcactgcaggagggggcggagggcggccagggctgctccgaggcttgggcgacccttggctgggccgcggccggcggcttcgggggcggcggcggggcctgcactgcgggcggaggcggcggcggctacagggggggcgacgcttcagagactgacaacctctgggctgatggggaagatggagtatccttcatacaccccagcagcgagctcttcctgcagcctctggcagtcaccgagaaccacggagaggtagagatccgaaggcacctcaactgcagtcactgccctttgagagactgccaatggcaggcagagctccagctggctgaatgcctgtgcccagaaggcatggagctagctgtggataacgtcacctgcatggacctgcayaagcccccaggccctctggttctgatggtggctgtggtggcaacctcaacactgagcctccttatggtgtgtggggtcctgattctggtgaagcagaagaagtggcagggcctgcaggagatgaggctgccgagccctgagcttgagctgagcaagcttcgaacctctgccatcaggacagcccccaatccctattattgccaggtggggcttggcccggcccagtcctggcctctgccaccaggtgtcaccgaggtttccccagccaatgttactctgctcagagccctgggccatggtgcctttggggaggtgtatgagggactggtaattggccttcctgggractccagtcccctgcaggtagctatcaagaccctgccagaactctgctcgcctcaggatgagctggatttcctcatggaggccctcatcatcagcaagtttcgccatcagaacattgtgcggtgtgtggggctcagcctcagggccacccctcgcctcattctgctggaactgatgtctggaggggacatgaagagtttcctgaggcacagtcggccacacctgggccagccatcacctctggtcatgcgggacctgctgcaactggcccaggacatagcccagggctgccactacctggaggaaaatcacttcatccacagggatattgccgcccggaactgcctgctgagctgcgctggacccagccgagtggccaagattggggactttgggatggcacgagatatctaccgggccagttattaccgcaggggggaccgggccttgctcccagtcaagtggatgcccccagaggccttcctggagggcatcttcacatccaagacagattcctrgtcttttggggtgctgctctgggagatcttctcactgggctacatgccctatcctgggcgcaccaaccaggaggtgctggacttcgtcgttggaggaggccggatggaccctcctaggggctgcccagggcctgtgtaccgcatcatgacccagtgttggcagcacgagcctgagctccgccctagctttgccagcatcttggagcgtctgcagtactgcactcaggacccggatgtgctgaattcactcctgccaatggagctggggcccaccccagaggaggaagggacttctgggctggggaacagatctttggagtgcctaagacccccacagccccaggaactgagtccagagaagttgaaaagctggggaggtagccctcttggcccctggctgtcctctggcctcaagcccctcaaatccaggggcctccaacctcagaacctttggaatcccacttatcgctcctgagccccaaggggccctgagggtaaggactgaggcactgagggtccctccctatactcctcaggctcctgggtggcctgttatgccagcggcctctgttccctgcagtctgtgctgtgtgtctgggcctgtctcggggctggcctggcagcgctgcacttgccatgctggaaaccagcccaggcctcccagggaagggcccagccacttccagcttttgatcttggggccagaggccgccttacacacaccccaggtgtccatggggagcactggattgctctcccattatgagcrtccttcatctgggcagaccccccaccctgcagatgcttctaataaaaagctcttctcatcctcc

SEQ ID NO: 107 - DNA, 2478 bp, Homo sapiens
gcccagacaggcctggagcacgtaggtggcggggctggagggacggatttcaggtgatctgggaggaggacccagggtagcgtgtccagtttctttgctggaacctgcctgcgggcctttggtctgtaagggagcaactgtggcctcctctgtgcatagatctcgggcacggcccttcaacgggcggcgaargctgcgactcgrtgattcctcattgtagagttgggtgctccagcctcttgttgagccgtgtctaaggcagaccttgaagttgctgtccagacctgagatgtggagagccgtgggcccagtgcccgttgcctgcctgttgttcctgggagcctactaccaggcctggagccagcaaccaagctcatgcccggaggattggctccaggacatgsagcgcctgtcagaggagctgctgctgccactgctgagtcagcccacactgggcagcctgtgggattcccttaggcactgctcccttctctgcaacccgctgtcctgtgtgccagcccttgaagctccccccagcctcgtgtcactgggctgctcgggaggctgcccccrtctcagtctggctggctcagcctcacccttcccattcctcactgccctcctctctcttcttaataccctggcccagatccacaaggggctgtgtggccagctggctgccatattggctgccccgggactccagaattacttcctccagtgtgtggctcctggggctgccccacacctcacacctttctctgcatgggccctgcgccatgagtaccacctgcagtacctggcactcgctctggcccagaaagyggcagcgctgcarccactgccagccacccatgctgccctctatcatggtatggccttggccctgctgagccggctgctgcccggaagtgagtacctcacccatgagctgctgctgagctgtgtattccggctggagttcctcccggaaagaacatcagggggtccagaggcagccgacttctctgaccagctgtcgttaggaagcagcagrgtccctcggtgtgggcaagggactctgctggctcaggcctgccaggacctccccagcatccgcaactgctacctgactcattgctcgccagcccgagccagtctgctggcctcccaggctctgcaccgaggggagctacagcgagtcccaaccctgctactgcccatgcctacggagccgctgctgcccaccgactggcccttcctgccactgattsgcctctaccaccgggcttcagacaccccctcgggactctctcccacagacaccatgggcacagccatgcgggtcctgcagtgggtgctagttttggagagctggcgcccccaggctctctgggctgtgccccctgctgcccgcctggcacggctcatgtgtgtgttcctggtggacagtgagctgttccgggagtccccagtacagcatctggtggcagccctcctcgcccagctctgtcagcctcaagtcttgccaaacctcaacctggactgccgactccctggcctgacgtctttccctgacctctatgccaacttcctggatcattttgaggctgtctcttttggggaccacctctttggggccctggtcctcctgcccctgcagcgtcggttcagtgtcaccttgcgccttgccctctttggggaacacgtgggagccttgcgagctctgagcctgcctctgacccagttgcctgtgtccctggagtgttacacagtgcctcctgaagacaacctggccctccttcagctctacttccggaccctggttactggtgcgctccgcccacgttggtgccccgtgctctatgctgtggctgtggctcatgtcaatagcttcatcttctctcaggacccacagagctcagatgaggtcaaagctgcccgcaggagtatgctgcagaaaacatggctgctggcagatgagggtctccggcagcacctcctgcactataagcttcccaattccacgctcccagagggctttgagctctattctcagttgccccctctgcgtcagcactacctccagagactgacttcaacagtgctccaaaatggggtatcagagacctaggatagttgatatagatggaaagatgggtacgttgtcctgtatccagcctttcaacagatgtctggccagacgaagaacattgtgtcctaatggtaggcaggagaccaaggagcagaaggcttgccttcctgggagcaggttgtttgagctgttttagagcagtgagccctaccattacatcctgatatctggggcttctgaaggtctgtrctgggagtgaagagtggcttagctatttacccgctctttggggacagggcaaactaaatgcatcccttcttacctaactcccaacccctgccctgggctgaggcatatgaatgctatagttgtgcattaaaataaatgttttttatctcctggaa

SEQ ID NO: 108 - DNA, 4664 bp, Homo sapiens
ctgcggggcaagatggcggcgcccagacaggcctggagcacggatgaataagagggaacccccacayggagacactgctggagagagtcgtactggggaggcagctggagcagcaagatgctgtygagaccgaagccaggggagtccgaggtggacctgctgcacttccagagtcagtttctcgcagctggtgcagccccagcagtgcagytggtgaagaaaggaaataggggcggtggtgatgccaactcagaccggcctccgctccaggaccatcgggatgtggtgatgttggacaatctcccagatttgcccccagctttggtcccttctcctccaaagagagccaggcccagccctggccactgcctgcctgaggatgaggacccagaagagaggctgaggaggcatgatcagcacatcactgctgtcttgactaagattattgaacgagatacaagttcagtggccgtgaatctgcctgtgcccagtggtgttgctttccctgctgtgttccttcgctcgcgggacacacaggggaaatcagcaacatctggtaagagaagcatctttgcccaggaaattgcggcaaggaggatagctgaagccawgggcccatcagttggggaagttgtgcccaacgtgggcccaccagagggtgccgtgacctgtgagacacccactcctaggaaccagggctgccagcttcctgggagcagccacagctttcagggacccaatctggtcacagggaaggggctcagggatcaagaagctgagcaggaagcccagactatccatgaagagaacatagcaagactgcaggccatggctcctgaggagatcctgcaggaacagcagcggttgctggcccagcttgaccccagcttggttgctttcttgagatctcacagccacacgcaagagcaaacaggagagacagcctctgaggagcagaggccaggaggaccctctgctaatgtcaccaaggaggaacccctcatgtcagcttttgccagtgagcccaggaagagagacaagctggagccagaagccccagctctggcattgcccrtgacccctcagaaagaatggctgcacatggacactgtcgagctggagaagctccactggacccaggacttgccccctgtccggcggcagcagacacaggagaggatgcaggctcgrttcagtcttcagggagaactactggcccctgacgtggacctgcccacccacctgggtctgcaccaccatggagaggaggcagagagagcggggtattccctacaggagctgttccacctgacccgcagccaggtttcccagcagagagcactggcactgcatgtgttagcccaggtcatcagcagggcccaggctggtgagtttggggaccrgctagcaggcagtgtcttaagcctccttttggatgctggtttcctcttcctactgcgcttctccttggatgacagagtggatggggtcattgcaaccgccatccgtgctcttcgggctctgctggtggctcctggagatgaggagctcctcgacagcaccttctcttggtaccatggagctttgacgttccctctgatgcccagccaggaggacaaggaggatgaggacraggatgaagaatgcccagcaggaaaagcaaaaaggaaaagccctgaagaagaaagccggcctccacctgacctggcccgacatgatgtcatcaaggggctcctggctaccagcctgctgcctcggctgygctacgtgctggaggtgacatacccaggacctgcggtggtccttgacatcctggctgtgctcatccgcctggcccggcattccctggaatcagccacargggtcctggagtgccctcggctgatagagactatagttcgagagttcttgcccaccagttggtctcctgtgggggcagggcctacccctagtctatacaaagtaccctgtgctactgccatgaaactacttcgtgtcctggcctcagctgggaggaatattgctgcccggctgttgagcagctttgatctccggagccgcctgtgccgcatcatagctgaggctccccaagaactggccttgcccccagaggaagctgagatgctgagcaccgaggccctccgtctgtgggctgtggctgcctcctatggccagggcggttacctttacagggagctctacccagtgctgatgcgggccttgcaggtggtgccgcgggagctcagcacccacccacctcaacccctgtccatgcagcggatagcctcactgctcactctcctcacccagctaaccctggcagccggcagtacccctgctgaaaccatcagtgattctgctgaggccagcctctcggccaccccttccttagtcacttggacacaggtgtctgggctccagcctcttgttgagccgtgtctaaggcagaccttgaagttgctgtccagacctgagatgtggagagccgtgggcccagtgcccgttgcctgcctgttgttcctgggagcctactaccaggcctggagccagcaaccaagctcatgcccggaggattggctccaggacatgsagcgcctgtcagaggagctgctgctgccactgctgagtcagcccacactgggcagcctgtgggattcccttaggcactgctcccttctctgcaacccgctgtcctgtgtgccagcccttgaagctccccccagcctcgtgtcactgggctgctcgggaggctgcccccrtctcagtctggctggctcagcctcacccttcccattcctcactgccctcctctctcttcttaataccctggcccagatccacaaggggctgtgtggccagctggctgccatattggctgccccgggactccagaattacttcctccagtgtgtggctcctggggctgccccacacctcacacctttctctgcatgggccctgcgccatgagtaccacctgcagtacctggcactcgctctggcccagaaagyggcagcgctgcarccactgccagccacccatgctgccctctatcatggtatggccttggccctgctgagccggctgctgcccggaagtgagtacctcacccatgagctgctgctgagctgtgtattccggctggagttcctcccggaaagaacatcagggggtccagaggcagccgacttctctgaccagctgtcgttaggaagcagcagrgtccctcggtgtgggcaagggactctgctggctcaggcctgccaggacctccccagcatccgcaactgctacctgactcattgctcgccagcccgagccagtctgctggcctcccaggctctgcaccgaggggagctacagcgagtcccaaccctgctactgcccatgcctacggagccgctgctgcccaccgactggcccttcctgccactgattsgcctctaccaccgggcttcagacaccccctcgggactctctcccacagacaccatgggcacagccatgcgggtcctgcagtgggtgctagttttggagagctggcgcccccaggctctctgggctgtgccccctgctgcccgcctggcacggctcatgtgtgtgttcctggtggacagtgagctgttccgggagtccccagtacagcatctggtggcagccctcctcgcccagctctgtcagcctcaagtcttgccaaacctcaacctggactgccgactccctggcctgacgtctttccctgacctctatgccaacttcctggatcattttgaggctgtctcttttggggaccacctctttggggccctggtcctcctgcccctgcagcgtcggttcagtgtcaccttgcgccttgccctctttggggaacacgtgggagccttgcgagctctgagcctgcctctgacccagttgcctgtgtccctggagtgttacacagtgcctcctgaagacaacctggccctccttcagctctacttccggaccctggttactggtgcgctccgcccacgttggtgccccgtgctctatgctgtggctgtggctcatgtcaatagcttcatcttctctcaggacccacagagctcagatgaggtcaaagctgcccgcaggagtatgctgcagaaaacatggctgctggcagatgagggtctccggcagcacctcctgcactataagcttcccaattccacgctcccagagggctttgagctctattctcagttgccccctctgcgtcagcactacctccagagactgacttcaacagtgctccaaaatggggtatcagagacctaggatagttgatatagatggaaagatgggtacgttgtcctgtatccagcctttcaacagatgtctggccagacgaagaacattgtgtcctaatggtaggcaggagaccaaggagcagaaggcttgccttcctgggagcaggttgtttgagctgttttagagcagtgagccctaccattacatcctgatatctggggcttctgaaggtctgtrctgggagtgaagagtggcttagctatttacccgctctttggggacagggcaaactaaatgcatcccttcttacctaactcccaacccctgccctgggctgaggcatatgaatgctatagttgtgcattaaaataaatgttttttatctcctggaa

SEQ ID NO: 109 - DNA, 1948 bp, Homo sapiens
gcccagacaggcctggagcacgtaggtggcggggctggagggacggatttcaggtgatctgggaggaggacccagggtagcgtgtccagtttctttgctggaacctgcctgcgggcctttggtctgtaagggagcaactgtggcctcctctgtgcatagatctcgggcacggcccttcaacgggcggcgaargctgcgactcgrtgattcctcattgtagagttgggtgctccagcctcttgttgagccgtgtctaaggcagaccttgaagttgctgtccagacctgagatgtggagagccgtgggcccagtgcccgttgcctgcctgttgttcctgggagcctactaccaggcctggagccagcaaccaagctcatgcccggaggattggctccaggacatgsagcgcctgtcagaggagctgctgctgccactgctgagtcagcccacactgggcagcctgtgggattcccttaggcactgctcccttctctgcaacccgctgtcctgtgtgccagcccttgaagctccccccagcctcgtgtcactgggctgctcgggaggctgcccccrtctcagtctggctggctcagcctcacccttcccattcctcactgccctcctctctcttcttaataccctggcccagatccacaaggggctgtgtggccagctggctgccatattggctgccccgggactccagaattacttcctccagtgtgtggctcctggggctgccccacacctcacacctttctctgcatgggccctgcgccatgagtaccacctgcagtacctggcactcgctctggcccagaaagyggcagcgctgcarccactgccagccacccatgctgccctctatcatggtatggccttggccctgctgagccggctgctgcccggaagtgagtacctcacccatgagctgctgctgagctgtgtattccggctggagttcctcccggaaagaacatcagggggtccagaggcagccgacttctctgaccagctgtcgttaggaagcagcagrgtccctcggtgtgggcaagggactctgctggctcaggcctgccaggacctccccagcatccgcaactgctacctgactcattgctcgccagcccgagccagtctgctggcctcccaggctctgcaccgaggggagctacagcgagtcccaaccctgctactgcccatgcctacggagccgctgctgcccaccgactggcccttcctgccactgattsgcctctaccaccgggcttcagacaccccctcgggactctctcccacagacaccatgggcacagccatgcgggtcctgcagtgggtgctagttttggagagctggcgcccccaggctctctgggctgtgccccctgctgcccgcctggcacggctcatgtgtgtgttcctggtggacagtgagctgttccgggagtccccagtacagcatctggtggcagccctcctcgcccagctctgtcagcctcaagtcttgccaaacctcaacctggactgccgactccctggcctgacgtctttccctgacctctatgccaacttcctggatcattttgaggctgtctcttttggggaccacctctttggggccctggtcctcctgcccctgcagcgtcggttcagtgtcaccttgcgccttgccctctttggggaacacgtgggagccttgcgagctctgagcctgcctctgacccagttgcctgtgtccctggagtgttacacagtgcctcctgaagacaacctggccctccttcagctctacttccggaccctggttactggtgcgctccgcccacgttggtgccccgtgctctatgctgtggctgtggctcatgtcaatagcttcatcttctctcaggacccacagagctcagtaagttacatctccatcttcagaggaaggaagggagctagcaat

SEQ ID NO: 110 - DNA, 4062 bp, Homo sapiens
ctgcggggcaagatggcggcgcccagacaggcctggagcacggatgaataagagggaacccccacayggagacactgctggagagagtcgtactggggaggcagctggagcagcaagatgctgtygagaccgaagccaggggagtccgaggtggacctgctgcacttccagagtcagtttctcgcagctggtgcagccccagcagtgcagytggtgaagaaaggaaataggggcggtggtgatgccaactcagaccggcctccgctccaggaccatcgggatgtggtgatgttggacaatctcccagatttgcccccagctttggtcccttctcctccaaagagagccaggcccagccctggccactgcctgcctgaggatgaggacccagaagagaggctgaggaggcatgatcagcacatcactgctgtcttgactaagattattgaacgagatacaagttcagtggccgtgaatctgcctgtgcccagtggtgttgctttccctgctgtgttccttcgctcgcgggacacacaggggaaatcagcaacatctggtaagagaagcatctttgcccaggaaattgcggcaaggaggatagctgaagccawgggcccatcagttggggaagttgtgcccaacgtgggcccaccagagggtgccgtgacctgtgagacacccactcctaggaaccagggctgccagcttcctgggagcagccacagctttcagggacccaatctggtcacagggaaggggctcagggatcaagaagctgagcaggaagcccagactatccatgaagagaacatagcaagactgcaggccatggctcctgaggagatcctgcaggaacagcagcggttgctggcccagcttgaccccagcttggttgctttcttgagatctcacagccacacgcaagagcaaacaggagagacagcctctgaggagcagaggccaggaggaccctctgctaatgtcaccaaggaggaacccctcatgtcagcttttgccagtgagcccaggaagagagacaagctggagccagaagccccagctctggcattgcccrtgacccctcagaaagaatggctgcacatggacactgtcgagctggagaagctccactggacccaggacttgccccctgtccggcggcagcagacacaggagaggatgcaggctcgrttcagtcttcagggagaactactggcccctgacgtggacctgcccacccacctgggtctgcaccaccatggagaggaggcagagagagcggggtattccctacaggagctgttccacctgacccgcagccaggtttcccagcagagagcactggcactgcatgtgttagcccaggtcatcagcagggcccaggctggtgagtttggggaccrgctagcaggcagtgtcttaagcctccttttggatgctggtttcctcttcctactgcgcttctccttggatgacagagtggatggggtcattgcaaccgccatccgtgctcttcgggctctgctggtggctcctggagatgaggagctcctcgacagcaccttctcttggtaccatggagctttgacgttccctctgatgcccagccaggaggacaaggaggatgaggacraggatgaagaatgcccagcaggaaaagcaaaaaggaaaagccctgaagaagaaagccggcctccacctgacctggcccgacatgatgtcatcaaggggctcctggctaccagcctgctgcctcggctgygctacgtgctggaggtgacatacccaggacctgcggtggtccttgacatcctggctgtgctcatccgcctggcccggcattccctggaatcagccacargggtcctggagtgccctcggctgatagagactatagttcgagagttcttgcccaccagttggtctcctgtgggggcagggcctacccctagtctatacaaagtaccctgtgctactgccatgaaactacttcgtgtcctggcctcagctgggaggaatattgctgcccggctgttgagcagctttgatctccggagccgcctgtgccgcatcatagctgaggctccccaagaactggccttgcccccagaggaagctgagatgctgagcaccgaggccctccgtctgtgggctgtggctgcctcctatggccagggcggttacctttacagggagctctacccagtgctgatgcgggccttgcaggtggtgccgcgggagctcagcacccacccacctcaacccctgtccatgcagcggatagcctcactgctcactctcctcacccagctaaccctggcagccggcagtacccctgctgaaaccatcagtgattctgctgaggccagcctctcggccaccccttccttagtcacttggacacaggtgtctgggctccagcctcttgttgagccgtgtctaaggcagaccttgaagttgctgtccagacctgagatgtggagagccgtgggcccagtgcccgttgcctgcctgttgttcctgggagcctactaccaggcctggagccagcaaccaagctcatgcccggaggattggctccaggacatgsagcgcctgtcagaggagctgctgctgccactgctgagtcagcccacactgggcagcctgtgggattcccttaggcactgctcccttctctgcaacccgctgtcctgtgtgccagcccttgaagctccccccagcctcgtgtcactgggctgctcgggaggctgcccccrtctcagtctggctggctcagcctcacccttcccattcctcactgccctcctctctcttcttaataccctggcccagatccacaaggggctgtgtggccagctggctgccatattggctgccccgggactccagaattacttcctccagtgtgtggctcctggggctgccccacacctcacacctttctctgcatgggccctgcgccatgagtaccacctgcagtacctggcactcgctctggcccagaaagyggcagcgctgcarccactgccagccacccatgctgccctctatcatggtatggccttggccctgctgagccggctgctgcccggaagtgagtacctcacccatgagctgctgctgagctgtgtattccggctggagttcctcccggaaagaacatcagggggtccagaggcagccgacttctctgaccagctgtcgttaggaagcagcagrgtccctcggtgtgggcaagggactctgctggctcaggcctgccaggacctccccagcatccgcaactgctacctgactcattgctcgccagcccgagccagtctgctggcctcccaggctctgcaccgaggggagctacagcgagtcccaaccctgctactgcccatgcctacggagccgctgctgcccaccgactggcccttcctgccactgattsgcctctaccaccgggcttcagacaccccctcgggactctctcccacagacaccatgggcacagccatgcgggtcctgcagtgggtgctagttttggagagctggcgcccccaggctctctgggctgtgccccctgctgcccgcctggcacggctcatgtgtgtgttcctggtggacagtgagctgttccgggagtccccagtacagcatctggtggcagccctcctcgcccagctctgtcagcctcaagtcttgccaaacctcaacctggactgccgactccctggcctgacgtctttccctgacctctatgccaacttcctggatcattttgaggctgtctcttttggggaccacctctttggggccctggtcctcctgcccctgcagcgtcggttcagtgtcaccttgcgccttgccctctttggggaacacgtgggagccttgcgagctctgagcctgcctctgacccaggtactttctcagcccagcaggacctgcaagggtaccctgcactgggcctcgggggcagtcctgagccttgaggagctttggaagacctcagcttcctcatcttacctcttgggggctttgaggggattaagagaatcaatgaaaagggct

SEQ ID NO: 111 - DNA, 1344 bp, Homo sapiens
ctgccrtgctgactcatgtgcccgcagctagcaggagctggcagcatgggctccccaggggctacgacaggctgggggcttctggattataaracggagaagtatgtgatgaccaggaactggygggkgggcgccctgcagaggctgctgcagtttgggatcgtggtctatgtggtagggtgggckctcctsgccaaaaaaggctaccaggagcgggacctggaaccccagttttccatcatcaccaaactcaaaggggtttccgtcactcagatcaaggagcttggaaaccggctgtgggatgtggccgacttcgtgaagccacctcagggagagaacgtgttcttcttggtgaccaacttccttgtgacgccagcccaagttcagggcagatgcccagagcacccgtccgtcccactggctaactgctgggtcgacgaggactgccccgaaggggagggaggcacacacagycacggtgtaaaaacaggccagwgtgtggtgttcaatgggacccacaggacctgtgagatctggagttggtgcccmgtggagagtggcgttgtgccctcgaggcccctgctggcccaggcccagaacttcacactgttcatcaaaaacacagtcaccttcagcaagttcaacttctctaagtccaatgccttggagacctgggaccccacctattttaagcactgccgctatgaaccacaattcagcccctactgtcccgtgttccrcattggggacctcgtggccaaggctggagggaccttcgaggacctggcgttgctgggtggctctgtaggcatcagagttcactgggattgtgacctggacaccggggactctggctgctggcctcactactccttccagctgcaggagaagagctacaacttcaggacagccactcactggtgggagcarccgggtgtggaggcccgcaccctgctcaagctctatggaatccgcttcgacatcctcgtcaccgggcaggtaggcacagggaagttcgggctcatccccacggccgtcacactgggcaccggggcagcttggctgggcgtggtcacctttttctgtgacctgctactgctgtatgtggatagagaagcccatttctactggaggacaaagtatgaggaggccaaggccccgaaagcaaccgccaactctgtgtggagggagctggcccttgcatcccaagcccgactggccgagtgcctcagacggagctcagcacctgcacccacggccacwgctgctgggagtcagacacagacaccaggatggccctgtccaagttctgacacccacttgccaacccattccgggagcctg

SEQ ID NO: 112 - DNA, 3554 bp, Homo sapiens
ctgccrtgctgactcatgtgcccgcagctagcaggagctggcagcatgggctccccaggggctacgacaggctgggggcttctggattataaracggagaagtatgtgatgaccaggaactggygggkgggcgccctgcagaggctgctgcagtttgggatcgtggtctatgtggtagggtgggckctcctsgccaaaaaaggctaccaggagcgggacctggaaccccagttttccatcatcaccaaactcaaaggggtttccgtcactcagatcaaggagcttggaaaccggctgtgggatgtggccgacttcgtgaagccacctcagggagagaacgtgttcttcttggtgaccaacttccttgtgacgccagcccaagttcagggcagatgcccagagcacccgtccgtcccactggctaactgctgggtcgacgaggactgccccgaaggggagggaggcacacacagycacggtgtaaaaacaggccagwgtgtggtgttcaatgggacccacaggacctgtgagatctggagttggtgcccmgtggagagtggcgttgtgccctcgaggcccctgctggcccaggcccagaacttcacactgttcatcaaaaacacagtcaccttcagcaagttcaacttctctaagtccaatgccttggagacctgggaccccacctattttaagcactgccgctatgaaccacaattcagcccctactgtcccgtgttccrcattggggacctcgtggccaaggctggagggaccttcgaggacctggcgttgctgggtggctctgtaggcatcagagttcactgggattgtgacctggacaccggggactctggctgctggcctcactactccttccagctgcaggagaagagctacaacttcaggacagccactcactggtgggagcarccgggtgtggaggcccgcaccctgctcaagctctatggaatccgcttcgacatcctcgtcaccgggcaggcagggaagttcgggctcatccccacggccgtcacactgggcaccggggcagcttggctgggcgtggtcacctttttctgtgacctgctactgctgtatgtggatagagaagcccatttctactggaggacaaagtatgaggaggccaaggccccgaaagcaaccgccaactctgtgtggagggagctggcccttgcatcccaagcccgactggccgagtgcctcagacggagctcagcacctgcacccacggccacwgctgctgggagtcagacacagacaccaggatggccctgtccaagttctgacacccacttgccaacccattccgggagcctgtagccgttccctgctggttgagagttgggggctgggaagggcggggccctgcctggggatytcaaggatgaggccccagcatggaggattgggggtagaattccacccttgaaccccagcaracagtccctcccctgactcccaccttggtagggtgctgcctcagggagccataraagtcggctgtgttttgagacggcgacagaacctgacccgtggagactgggagagcccagcaggcacctgtattgcagggctccgactgcatgtggcaggggctcctgctgcgtctgggcctgraggtctctctcccagtgctctgtccccagtgttcctagcagaggtatgcttaccagctgtcagcacaraccctcctgctgcctgggtcctggccctcctcccccatctgcacccccatcataggtagagaccccaccctcccatcggtcctacatggggctgtgcagctggagccaaaaaggcaaggyagaaagaggagtgatgggggagggggattgtttcagcttctctggtgctgwgatgccccaggagagtcctaatctagggaatggggtggagtaggcagataatccacctccctatcccccaggcaagggcggagcatgtgtcttgggcccacacctgcttagtttatgaggaccggctgctttccagtggtagcccttttgccatggaggtctgggagagagagcagagggcggcagggctaagttggtgatcaytgggttcttcaggaccttctatatccctcctcggtraccccccagcccaaccccttggaatctttcctccaggcttcctgagagccctgggggtgggaggctgtgggaggctgtacatctgaaattcacttcagtccaagtcatacctaggaagctgtctgggcagctgctcgagggaggccctggctctgatcccaggctggatggagtggctggaaggaatggttccaaacaacaccaccgagatctccctcaggctggccaggttttgcagctggaattctcctcttggtcccagggcggggcagggaattctaagtgtccaccccagggaggcaaggggctgctttccactgtgggtacctggtgatcagggcaagctgtggagggccaggggtggggctgagactgggctgacatctagaatcacctgccacctggagcctcagtaaaatgcctggggtccctgctgcctctcaatctccagagccatgtccatggggaggtgggctctgaagggygaaggtgggagagcagggcccctgaggcctgggtatccaasgargggcacgtgcacctgattctccttggggcccagaggaagctgatgtcatggctggacaaagtcacggagtaaagccagcaaagccaccctcttcctgtgtagtccttacaggcatgactggaaagttggggggcatytatggtagacatggcacagccatgaagagaccagtggggtggtgcagggtggacttggggaccctacccctgaagactgaggccctgcagctaccaggtgggctagaaggtaactggaacaggcctgggcactygtgcacccatgtaggagcatgagggccacactcttttcacctcaaagcccttgaagagtgggcaaagacagcaagagagctgcagcctgggcccgagctcagaaacagctgtcgcctcagtctgcgcacargcatgcaccccagsgtagtgcctgcagggatgcatgtgtccccgtgggggtgcctgtgccaggcaggcctcaggtgcatgccatgctcagaaccctgctgccctttctaggcagcctccttggggcccaagctctgctccctggatctgccacctagcagacgtggggagcctgaccccatgcctgtcatggaaccctccttgcctggtgtgtgtggctcccctcttcactgggcacctggatccaggccyacctgtgtccctgactcagggtggtcccaggmctggcacctactctttagagagccccagcatctttgatgtggattggagacaattgcctggttccctggggcaggtgaagacttggtgccacaaagaatgccacagtggatacgccagcaggccacatggctggccaagcaattattattatggatcccttgggctgtgggccttcccatccaccccaccacaactgcccaggtagctggarctgatcataaa

SEQ ID NO: 113 - DNA, 2334 bp, Homo sapiens
cgggctcagtgctcagagcggaggcagcggctgcggcagcagcaggttccagtagctggctcggtgctcttctcrgccacctgccatggcccgggggctgcccaccattgctagcctggcacgcttatgccagaagctgaaccgcctgaagccgctggaggactccaycatggagacgtcactgcggcgctgcctgtccacrctggacctgactcttctgggcgtrggtggcatggtgggctcgggtctctacgtgctcacaggtgccgtggccaaggaggtggctggccctgctgtgctcttgtccttcggtgtggcmgstgtggcctccctgctggcagccytatgctatgcaraatttggggcacgtgtgccacgcacgggctctgcctacctgttcacctacgtatccatgggcgagctgtgggccttcctcatcggctggaatgttctcctcgaawacatcatcggtggcgccgccgtggcccgtgcctggagtggctacctggactctatgttcagccacagcatccgcaacttcactgagacccacgtgggttcttggcaggtgcccctcctgggccactacccrgacttcctggctgctggcatcatcctcctggcctctgcctttgtctcctgtggagcccgcgtgtcctcctggctcaatcacaccttctcggccatcagcctgcttgtcattctcttcattgtcatcctgggcttcatcctggcccagcctcacaactggagcgctgacgaaggcrgctttgcacccttcggcttctccggcgtcatggccggcactgcctcctgcttctatgctttcgtgggcttcgacgtcattgccgcctccagtgaggaggcccagaacccacggcggtctgtgcctctggccatcgccatctcgcttgccattgcagctggtgcctacatccttgtctccaccgtgctaaccctcatggtgccctggcacagcctggaccccgactcagcgcttgcagatgccttctaccagcggggctacaggtgggctggcttcatcgtggcagctggctccatctgcgccatgaacaccgtcctgctcagcctcctcttctccctgccacgcattgtctatgccatggccrccgatgggctcttcttccaggtgtttgcccatgtgcacccccggacacaggtgcctgtggcrggcaccctggcgttcgggctcctcacggccttcctggcactgctgctggacctggagtcgctggttcagttcctgtcccttggcacactcctggcctacacattcgtggccaccagtatcattgtgctgcgcttccagaagtcttccccgcccagctccccaggcccagccagccctggccccctgaccaagcagcagagctccttctcagaccacctacagctggtgggcactgtacacgcctccgtccctgagccaggggagctgaagccagccctgaggccctacctgggcttcttggatgggtacagccctggagcagtggtgacttgggcgcttggcgttatgttggcctcagccatcaccataggctgcgtgcttgtctttgggaactcgaccctgcacctcccacactggggttacatcctgctgctcctgctcaccagtgtcatgtttctgctcascctccttgtcctgggggctcaccagcaacagtatcgggaagacttatttcagatccccatggttcccctgattccagccctgagcatcgtcctcaacatctgcctcatgctgaaacttagctatctgacctgggtgcgcttctccatctggctgctgatgggacttgcagtgtatttcggctatggcatccggcatagcaaggagaaccagcgggagctgccagggctgaactccacacactacgtggtattccccaggggcagcctggaggagacagtgcaggctatgcagccccccagccaggcaccagcacaggaccctggccatatggagtagctgatcagcccacacttgccccgccctcccayacctgcttgggaggccagagaggccagacragccgagagccccttctgttgtgggcagcctgggtttgcaggcctgcacaggctggggagtcctcaggaccttaggaccttcatccaggggctgggcttcgggtcttcaggagtgggccttggctggtgctggtgccatggactctgcccagagccttcttgtttatgatcagytccagctacctgggcagttgtggtggggtggatgggaaggcccacagcccaagggatccataataataattgcttggccagccatgtggcctgctggcgtatcca

SEQ ID NO: 114 - DNA, 2017 bp, Homo sapiens
agttggcgcccatggagccagagctgctggttcggaaggtgtctgcattgcaggcctgcgtccggggcttcttggtccgacgccagttccagagcctgcgagctgagtatgaggcgattgtacgagaggtcgagggcgacctgggcacgcttcagtggaccgagggccgcattcccaggccgcgattcctcccagagaaggcaaaatcccatcagacctggaaagcaggagacagggtagcaaatccagagcaggggctgtggaaccacttcccatgtgaagagtctgagggagaggccacctgggaggagatggtgctgaagaagtcaggagagagctcagcaaatcaaggaagcctctgcagagatcacagctcctggcttcagatgaagcagaacaggaaacccagccaagagaagaccagagacacgacaaggatggagaatccagaagccacagatcaaagactgccccacagccaacctcagcttcaagagcttcagtaccaccgcagccacttggccatggaattgctgtggctgcaacaggccatcaatagccgtaaggagtacctacttcttaaacaaacactgagatccccagaggcgggcccgatcagagaggaaccccgcgtgtkcctagaacatggggaacaggcctrtgagagggaccagtcacaaccaagcgcaccactggaggaccagtcctacagasacaggaccactggagagctagaacaggaggatgactcctgtcacagggtcaaatcaccccacagatccccaggaagtttggccactacacaaaaaaacattgctggggctaagtgcagagaaccatgctacagcaagtctggaccaccgtcgtctataccatcaaacagccaggccttgggggacaggctcaccaaagggccagacgatrgaagacagacctttggagggacctgcctgctgcagatgaaaatcctggaggaccagacccccagaggtttaaaacctaggaaccattgtcccaggaagtccaggacacagctgtctgcactctatgaggactcaaatattaaggagatgtctcccagaaaactagaccacaaagagcctgactgccgaacagtcaggacacaagagttgggcctctcagaggaccacatcatctgggatggtaccttggggggkccagagcatagtgtcctcgatctctggaggactaaaccacccaaaggccaggcccccactgayagaagctccagagatggaacctccaatgagcctagtcatgaaggacagaaaaagcagaggactataccatggagatcaaagtcacctgagattctgtcttctacaaaggcaggctgtacaggagaggaacagtggaggggcaggccatggaaaacagaaccacctggctagaccctakgaagccaggagaggatcaggttccaaaggggaatgctatgaaagggcagtgagacaagacctcatcctacctccctgaccagctctggcttctgctcctgcccctggccattggtgactagtggggccaagagaagctggagcagagagctggcatgagtatagggaaggaggaaggacacattttcaatcctctgcctgtagctcaatccaaatttgtggataaggggccgggtgcagtggctcacacctgtaatcccagcactttgggaggccaaggtgagtggatcacctgaggtcagaagtttgagaccagcctgaccaacatggtgaaatgaaaccccatctcaactaaaaatataaaaattagccaggcgtggtggtgcatgcctgtagtcccagttactcgggaggctgagacaggagaatcgcttgaacccaggagatggagattgcagtaggccaagatgatgccactgcactccagcctgggctacagagcgagacacggtctcaaaaaacaaatgtgtggctaaggagttacctgggggaagtagaatgagaggtctgttgggaataaaggtttttcttagattctg

SEQ ID NO: 115 - DNA, 2182 bp, Homo sapiens
ggaaaagtagcctaaagtcagtmtaactaaagggtggaacgaggtgggacaaggtccggaattgctgctcagtgatgtgtgtgtgcctgccgctggtggagctgagactgctcatctcagaaggatggggatgcttgatttcctggccaggttgtcccagcacagtggggattggccctgttgtatgacgaagacagcacatggtggcagagatagatactaacccatggactttccaagggagggaataggtctttggagggtatgcaagacaaaggtagacactggataaagaacccggtagtgcccaggtattaccccatctgggccattactcccacactcaggaaccagacgttgtgggtgaggacatgctgtccctcctgccaagtaataacttccttcccagccaggatcctgccccaagtaggaatatagctctgcatttacagcagctcctgctcagaccttgtcaaaaccaccctgcagcttaggattaaggagcatggtcacaggaaggtggggtttcagggcatcccctcaggaactgcccatctccccagaattccaaaatgaaggtccatatgcttgtaggtgtgctggtcatggtgggcttcacagtaggaaagggtaagtggggcccaggggcagggagggaggaaggggtaactgagtccaggaagggggtggagcgtggccatggataatcgggcttcctactggcccagggtatttgagagtgacccagtgcctccatccctccttctgcctccccagttcctgttcccgacatccggacgtgccacttctgcctcgtagaagacccttctgtaggatgcatttcaggctcagagaagtgtaccatcagcagctcatccctgtgcatggtgatcaccatctattatgatgtcaaggttcgcttcatcgttcgaggctgtggacagtacatttcctaccgctgccaagaaaaacgcaacacctactttgcagagtactggtatcaggcycagtgctgtcagtacrattattgcaactcctggtcaagcccccaactccagagctctctgccggagccccatgacaggcccctggccctgcctctgtctgactmccagattcagtggttctaccaggccctgaacctctccctgcccctccccaatttccatgcygsgacggagcctgatggcctggaccccatggtcacactgtccctgaacctgggcttgtcttttgctgagctgygccgcatgtacttgttcctcaatagttcaggacttttggttcttccccaggctggactcttgacacctcacccttcctgaattccacagtgcaaatatctttctgtaacaccctcagcatcctgcactgccctctctgaaaacacccacattctttggtcactgtgatttcttaggcctccgtctgttgtaccactagcatctatatgacttttgtgtaattttctctcttgaactctggtgctgtttttttgtttgtttgagacaaagtctygctctgtcacccagggtggagtgcagtggcatgatctctgctcactacaacctccacctcccgggttccagcgattctcctgcctcagcctcccgagtagctgggactacaggcgtgcaccaccacgcctggctaattttttgtatttttagtagagacggggtttcaccatgttggtcaggctggtctcgaactcctgacctcgtaatctgccctcctcgacctcccaaagtgccgggattacaggtgtgagccacygtgcctgkctgagctctggtgctgttcttccccctagaaaagaatctctagtgtggattctgcccagacaggctgacctgagaaaggcacagtggttcctccattccttccccatcatctgagtgttccagtatcccccatccctctcaatccagtcacctgcctattgacatctagctctgtttcccctgtcttgtccatgtctctaagacccagtaccagactgaactagcagcaagaaggacgaggaggccgggcatggtggctcacgccggtaatcccagmactttgggaggccgaggtgggcggatcacttgagattgggagtttgagaccagcctggccaacatggtaaaacccgctctctattaaaaatwgaaaaatcagctgggtgtggtggcacacc

SEQ ID NO: 116 - DNA, 1587 bp, Homo sapiens
ggaaaagtagcctaaagtcagtmtaactaaagggtggaacgaggtgggacaaggtccggaattgctgctcagtgatgtgtgtgtgcctgccgctggtggagctgagactgctcatctcagaaggatggggatgcttgatttcctggccaggttgtcccagcacagtggggattggccctgttgtatgacgaagacagcacatggtggcagagatagatactaacccatggactttccaagggagggaataggtctttggagggtatgcaagacaaaggtagacactggataaagaacccggtagtgcccaggtattaccccatctgggccattactcccacactcaggaaccagacgttgtgggtgaggacatgctgtccctcctgccaagtaataacttccttcccagccaggatcctgccccaagtaggaatatagctctgcatttacagcagctcctgctcagaccttgtcaaaaccaccctgcagcttaggattaaggagcatggtcacaggaaggtggggtttcagggcatcccctcaggaactgcccatctccccagaattccaaaatgaaggtccatatgcttgtaggtgtgctggtcatggtgggcttcacagtaggaaagggtaagtggggcccaggggcagggagggaggaaggggtaactgagtccaggaagggggtggagcgtggccatggataatcgggcttcctactggcccagggtatttgagagtgacccagtgcctccatccctccttctgcctccccagttcctgttcccgacatccggacgtgccacttctgcctcgtagaagacccttctgtaggatgcatttcaggctcagagaagtgtaccatcagcagctcatccctgtgcatggtgatcaccatctattatgatgtcaaggttcgcttcatcgttcgaggctgtggacagtacatttcctaccgctgccaagaaaaacgcaacacctactttgcagagtactggtatcaggcycagtgctgtcagtacrattattgcaactcctggtcaagcccccaactccagagctctctgccggagccccatgacaggcccctggccctgcctctgtctgactmccagattcagtggttctaccaggccctgaacctctccctgcccctccccaatttccatgcygsgacggagcctgatggcctggaccccatggtcacactgtccctgaacctgggcttgtcttttgctgagctgygccgcatgtacttgttcctcaatagttcaggacttttggttcttccccaggctggactcttgacacctcacccttcctgaattccacagtgcaaatatctttctgtaacaccctcagcatcctgcactgccctctctgaaaacacccacattctttggtcactgtgatttcttaggcctccgtctgttgtaccactagcatctatatgacttttgtgtaattttctctcttgaactctggtgctgtttttttgtttgtttgagacaaagtctygcttgcactccagcctgggtgacacagtgagactccgtctccaaaaaaaaggatgaggaatagaattct

SEQ ID NO: 117 - DNA, 2364 bp, Homo sapiens
gggcaatacagttttgtgctcactgggtgaagaggctgacttagggcggggaaaggaggragccaggctggatctctttccgcagctctcctcacgttcccctctagtcccggcgmggcgctgctgcccaggggactggcctatcctcggccaatccgctgggtccttattgcctgttgggcccctagtgcgaatcagtcccgccagagacccttgacgggcatactgtttcctccgggctcctgcctcatgaggggagaggtgcggcttggctccgtgcgtagggacttgggtggggtggggtgggcggtgtgagaactggaacgtcccaktgcgctaacctgaggtggtgccagccattctgctcgtccctttgcacttctccatttccycttaggctctaagtgtgaccttcgaaccctggtcagagtaatggtgaggggcagkcgtgacgttatttcattacacggcttctcggcattccacaggtttccctccgcctcctgagggcctttcctaacccacagagtggattcctggctccagaaaatgggcttggagcgggggccacgttgaggaaggcgaagggcattgtgggggcgttatgtaaaagtaggaccccaaccgacagatcctagtgctcgcgccacctgggcgcgcggagctttgctcgtttactattgaaaaagttccagcgcgggaaactgaacccggagctttgcgcacgcccgagccctcaagtaatgtgggttgtggtttttgttgttgttgtcgccacgcatgcgtcttcgtgccgtgtggctwtttgattgtgtcaactcttctgattagaatggcgccattttgcggtacggaagctacacagcaacacgtataggagactctccccgagatcttctagggagtgacccatctatttttgtttrggaagaggaaactccgaaatgggatcgcggaagamttaaagggccaggctgatttttttttcctactggtctctgaggctgtggttgctacagggtcaccacgagcttggcttacttgtctcatccttcccttgcctggtatcattttctcagttctcccaaaagccatgtcccggcccttgctcatcaccttcaccccagccactgaccccagcgacctctggaaggatgggcagcagcagccacagcccgagaagccagagtccaccctggatggggctgcagccckagctttctatgaggccctgattggggatgagagcagcgctcctgastcccagagatctcagactgaacctgccagagaaagaaagagaaagaaaagaagaataatgaaggcaccagcagcagaagcagtggcagaaggagcatcaggaagacatggacaagggagatcccttgaggctgaggataagatgactcaccggatactgagggcagyccaggagggggacytgccagaacttaggagactgctggaaccgcatgaggcaggaggagctggggggaatatcaacgcccgggatgccttctggtggaccccactgatgtgtgctgctcgagcgggccagggggcagctgtgagctatctcctgggccgtggggctgcctgggtgggggtctgtgagctgagtggcagggatgcggctcagctcgctgaagaagctggcttccctgaggtagcccgcatggtcagggagagccatggagagacaaggagcccggaaaaccggkctcctactccctccctccagtactgcgagaactgtgacacccacttccaagattccaaccaccgcacatccactgytcacctgctgtcactgtcgcagggtcctcagcctcccaaccttccacttggggtgcccatctccagcccgggcttcaaactgctgctgagggggggctgggagccaggaatggggctgggaccccggggtgagggccgtgccaatcccatccccactgtcctcaagagrgaccaggaaggactaggctacagatcagcaccccagccccgagtgacacatttcccagcttgggatacmcgagctgtggctgggagggagagaccccctcgggtggccacactgagctggagggaggagagaaggagggaggagaaagacagggcttgggagcgggatctaaggacttacatgaacctcgagttctgactttggtaaagtctgaccctagtctgctgctgaagtctgaacttgggyctctgacctgggccctttgacttccccttcctgggatctgcycagatgcagatcctgaagtttttggtcaataggctctgtcttcgtgagagacgggctgagagtcagaaataaatcaaccatttgtggtttattcacttttctggaagcta

SEQ ID NO: 118 - DNA, 1810 bp, Homo sapiens
ggcccgggagtctgggcaatacagttttgtgctcactgggtgaagaggctgacttagggcggggaaaggaggragccaggctggatctctttccgcagctctcctcacgttcccctctagtcccggcgmggcgctgctgcccaggggactggcctatcctcggccaatccgctgggtccttattgcctgttgggcccctagtgcgaatcagtcccgccagagacccttgacgggcatactgtttcctccgggctcctgcctcatgaggggagagaatggcgccattttgcggtacggaagctacacagcaacacgtataggagactctccccgagatcttctagggagtgacccatctatttttgtttrggaagaggaaactccgaaatgggatcgcggaagamttaaagggccaggctgatttttttttcctactgcaggtctctgaggctgtggttgctacagggtcaccacgagcttggcttacttgtctcatccttcccttgcctggtatcattttctcagttctcccaaaagccatgtcccggcccttgctcatcaccttcaccccagccactgaccccagcgacctctggaaggatgggcagcagcagccacagcccgagaagccagagtccaccctggatggggctgcagccckagctttctatgaggccctgattggggatgagagcagcgctcctgastcccagagatctcagactgaacctgccagagaaagaaagagaaagaaaagaagaataatgaaggcaccagcagcagaagcagtggcagaaggagcatcaggaagacatggacaagggagatcccttgaggctgaggataagatgactcaccggatactgagggcagyccaggagggggacytgccagaacttaggagactgctggaaccgcatgaggcaggaggagctggggggaatatcaacgcccgggatgccttctggtggaccccactgatgtgtgctgctcgagcgggccagggggcagctgtgagctatctcctgggccgtggggctgcctgggtgggggtctgtgagctgagtggcagggatgcggctcagctcgctgaagaagctggcttccctgaggtagcccgcatggtcagggagagccatggagagacaaggagcccggaaaaccggkctcctactccctccctccagtactgcgagaactgtgacacccacttccaagattccaaccaccgcacatccactgytcacctgctgtcactgtcgcagggtcctcagcctcccaaccttccacttggggtgcccatctccagcccgggcttcaaactgctgctgagggggggctgggagccaggaatggggctgggaccccggggtgagggccgtgccaatcccatccccactgtcctcaagagrgaccaggaaggactaggctacagatcagcaccccagccccgagtgacacatttcccagcttgggatacmcgagctgtggctgggagggagagaccccctcgggtggccacactgagctggagggaggagagaaggagggaggagaaagacagggcttgggagcgggatctaaggacttacatgaacctcgagttctgactttggtaaagtctgaccctagtctgctgctgaagtctgaacttgggyctctgacctgggccctttgacttccccttcctgggatctgcycagatgcagatcctgaagtttttggtcaataggctctgtcttcgtgagagacgggctgagagtcagaaataaatcaaccatttgtggtttattcacttttctggaagcta

SEQ ID NO: 119 - DNA, 2367 bp, Homo sapiens
gggcaatacagttttgtgctcactgggtgaagaggctgacttagggcggggaaaggaggragccaggctggatctctttccgcagctctcctcacgttcccctctagtcccggcgmggcgctgctgcccaggggactggcctatcctcggccaatccgctgggtccttattgcctgttgggcccctagtgcgaatcagtcccgccagagacccttgacgggcatactgtttcctccgggctcctgcctcatgaggggagaggtgcggcttggctccgtgcgtagggacttgggtggggtggggtgggcggtgtgagaactggaacgtcccaktgcgctaacctgaggtggtgccagccattctgctcgtccctttgcacttctccatttccycttaggctctaagtgtgaccttcgaaccctggtcagagtaatggtgaggggcagkcgtgacgttatttcattacacggcttctcggcattccacaggtttccctccgcctcctgagggcctttcctaacccacagagtggattcctggctccagaaaatgggcttggagcgggggccacgttgaggaaggcgaagggcattgtgggggcgttatgtaaaagtaggaccccaaccgacagatcctagtgctcgcgccacctgggcgcgcggagctttgctcgtttactattgaaaaagttccagcgcgggaaactgaacccggagctttgcgcacgcccgagccctcaagtaatgtgggttgtggtttttgttgttgttgtcgccacgcatgcgtcttcgtgccgtgtggctwtttgattgtgtcaactcttctgattagaatggcgccattttgcggtacggaagctacacagcaacacgtataggagactctccccgagatcttctagggagtgacccatctatttttgtttrggaagaggaaactccgaaatgggatcgcggaagamttaaagggccaggctgatttttttttcctactgcaggtctctgaggctgtggttgctacagggtcaccacgagcttggcttacttgtctcatccttcccttgcctggtatcattttctcagttctcccaaaagccatgtcccggcccttgctcatcaccttcaccccagccactgaccccagcgacctctggaaggatgggcagcagcagccacagcccgagaagccagagtccaccctggatggggctgcagccckagctttctatgaggccctgattggggatgagagcagcgctcctgastcccagagatctcagactgaacctgccagagaaagaaagagaaagaaaagaagaataatgaaggcaccagcagcagaagcagtggcagaaggagcatcaggaagacatggacaagggagatcccttgaggctgaggataagatgactcaccggatactgagggcagyccaggagggggacytgccagaacttaggagactgctggaaccgcatgaggcaggaggagctggggggaatatcaacgcccgggatgccttctggtggaccccactgatgtgtgctgctcgagcgggccagggggcagctgtgagctatctcctgggccgtggggctgcctgggtgggggtctgtgagctgagtggcagggatgcggctcagctcgctgaagaagctggcttccctgaggtagcccgcatggtcagggagagccatggagagacaaggagcccggaaaaccggkctcctactccctccctccagtactgcgagaactgtgacacccacttccaagattccaaccaccgcacatccactgytcacctgctgtcactgtcgcagggtcctcagcctcccaaccttccacttggggtgcccatctccagcccgggcttcaaactgctgctgagggggggctgggagccaggaatggggctgggaccccggggtgagggccgtgccaatcccatccccactgtcctcaagagrgaccaggaaggactaggctacagatcagcaccccagccccgagtgacacatttcccagcttgggatacmcgagctgtggctgggagggagagaccccctcgggtggccacactgagctggagggaggagagaaggagggaggagaaagacagggcttgggagcgggatctaaggacttacatgaacctcgagttctgactttggtaaagtctgaccctagtctgctgctgaagtctgaacttgggyctctgacctgggccctttgacttccccttcctgggatctgcycagatgcagatcctgaagtttttggtcaataggctctgtcttcgtgagagacgggctgagagtcagaaataaatcaaccatttgtggtttattcacttttctggaagcta

SEQ ID NO: 120 - DNA, 1807 bp, Homo sapiens
ggcccgggagtctgggcaatacagttttgtgctcactgggtgaagaggctgacttagggcggggaaaggaggragccaggctggatctctttccgcagctctcctcacgttcccctctagtcccggcgmggcgctgctgcccaggggactggcctatcctcggccaatccgctgggtccttattgcctgttgggcccctagtgcgaatcagtcccgccagagacccttgacgggcatactgtttcctccgggctcctgcctcatgaggggagagaatggcgccattttgcggtacggaagctacacagcaacacgtataggagactctccccgagatcttctagggagtgacccatctatttttgtttrggaagaggaaactccgaaatgggatcgcggaagamttaaagggccaggctgatttttttttcctactggtctctgaggctgtggttgctacagggtcaccacgagcttggcttacttgtctcatccttcccttgcctggtatcattttctcagttctcccaaaagccatgtcccggcccttgctcatcaccttcaccccagccactgaccccagcgacctctggaaggatgggcagcagcagccacagcccgagaagccagagtccaccctggatggggctgcagccckagctttctatgaggccctgattggggatgagagcagcgctcctgastcccagagatctcagactgaacctgccagagaaagaaagagaaagaaaagaagaataatgaaggcaccagcagcagaagcagtggcagaaggagcatcaggaagacatggacaagggagatcccttgaggctgaggataagatgactcaccggatactgagggcagyccaggagggggacytgccagaacttaggagactgctggaaccgcatgaggcaggaggagctggggggaatatcaacgcccgggatgccttctggtggaccccactgatgtgtgctgctcgagcgggccagggggcagctgtgagctatctcctgggccgtggggctgcctgggtgggggtctgtgagctgagtggcagggatgcggctcagctcgctgaagaagctggcttccctgaggtagcccgcatggtcagggagagccatggagagacaaggagcccggaaaaccggkctcctactccctccctccagtactgcgagaactgtgacacccacttccaagattccaaccaccgcacatccactgytcacctgctgtcactgtcgcagggtcctcagcctcccaaccttccacttggggtgcccatctccagcccgggcttcaaactgctgctgagggggggctgggagccaggaatggggctgggaccccggggtgagggccgtgccaatcccatccccactgtcctcaagagrgaccaggaaggactaggctacagatcagcaccccagccccgagtgacacatttcccagcttgggatacmcgagctgtggctgggagggagagaccccctcgggtggccacactgagctggagggaggagagaaggagggaggagaaagacagggcttgggagcgggatctaaggacttacatgaacctcgagttctgactttggtaaagtctgaccctagtctgctgctgaagtctgaacttgggyctctgacctgggccctttgacttccccttcctgggatctgcycagatgcagatcctgaagtttttggtcaataggctctgtcttcgtgagagacgggctgagagtcagaaataaatcaaccatttgtggtttattcacttttctggaagcta

SEQ ID NO: 121 - DNA, 1059 bp, Homo sapiens
aatgcccttcgccttcctcaacgtggcccccgctccaagcccattttctggagccaggaatccactctgtgggttaggaaaggccctcaggaggcggagggaaacctgtggaatgccgagaagccgtgtaatgaaataacgtcacgmctgcccctcaccattactctgaccagggttcgaaggtcacacttagagcctaagrggaaatggagaagtgcaaagggacgagcagaatggctggcaccacctcagctgacgtgaagatgagcagctcagaggaggtgtcctggatttcctggttctgtgggctccgtggcaatgaattctttgtgaagtggatgaagactacatccaggacaaatttaatcttactggactcaatgagcaggtccctcactatygacaagctctagacatgatcttggacctggagcctgatgaagaactggaagacaaccccaaccagagtgacctgattgagcaggcagccgagatgctttatggattgatccacgcccgctacatccttaccaaccgtggcatcgcccagatgttggaaaagtaccagcaaggagactttggttactgtcctcgtgtgtactgtgagaaccagccaatgcttcccattggcctttcagacatcccaggtgaagccatggtgaagctctactgccccaagtgcatggatgtgtacacacccaagtcatcaagacaccatcacacggatggcgcctacttcggcactggtttccctcacatgctcttcatggtgcatcccgagtaccggcccaagagacctgccaaccagtttgtgcccaggctctacggtttcaagatccatccgatggcctaccagctgcagctccaagccgccagcaacttcaagagcccagtcaagacgattcgctgattccctcccccacctgtcctgcagtctttgawttttcctttcttttttgccaccctttcaggaaccctgtatggtttttagtttaaattaaaggagtcgttatygtggtgggaatatgaaataaagtagaagaaaaggccatgagctag

SEQ ID NO: 122 - DNA, 1136 bp, Homo sapiens
gcttctcgttgtgccccgcccgcaagcgccctcctccgggccttcgtgacagccaggtcgtgcgcgggtcatcctgggattggtagttcgctttctctcatttagccagtttctttctctaccggggactccgtgtcccggcatccaccgcggcacctgacccttggcgcttgcgtgttgccctcttccccaccctccctaatttccactccccccaccccacttcgcctgccgcggtcgggtccgcggcctgcgctgtagcggtcgccgccgttccctggaagtagcaacttccctaccccaccccagtcctggtccccgtccagccgctgacgtgaagatgagcagctcagaggaggtgtcctggatttcctggttctgtgggctccgtggcaatgaattctttgtgaagtggatgaagactacatccaggacaaatttaatcttactggactcaatgagcaggtccctcactatygacaagctctagacatgatcttggacctggagcctgatgaagaactggaagacaaccccaaccagagtgacctgattgagcaggcagccgagatgctttatggattgatccacgcccgctacatccttaccaaccgtggcatcgcccagatgttggaaaagtaccagcaaggagactttggttactgtcctcgtgtgtactgtgagaaccagccaatgcttcccattggcctttcagacatcccaggtgaagccatggtgaagctctactgccccaagtgcatggatgtgtacacacccaagtcatcaagacaccatcacacggatggcgcctacttcggcactggtttccctcacatgctcttcatggtgcatcccgagtaccggcccaagagacctgccaaccagtttgtgcccaggctctacggtttcaagatccatccgatggcctaccagctgcagctccaagccgccagcaacttcaagagcccagtcaagacgattcgctgattccctcccccacctgtcctgcagtctttgawttttcctttcttttttgccaccctttcaggaaccctgtatggtttttagtttaaattaaaggagtcgttatygtggtgggaatatgaaataaagtagaagaaaaggccatgagctag

SEQ ID NO: 123 - DNA, 1484 bp, Homo sapiens
gcttctcgttgtgccccgcccgcaagcgccctcctccgggccttcgtgacagccaggtcgtgcgcgggtcatcctgggattggtagttcgctttctctcatttagccagtttctttctctaccggggactccgtgtcccggcatccaccgcggcacctgacccttggcgcttgcgtgttgccctcttccccaccctccctaatttccactccccccaccccacttcgcctgccgcggtcgggtccgcggcctgcgctgtagcggtcgccgccgttccctggaagtagcaacttccctaccccaccccagtcctggtccccgtccagccgctgacgtgaagatgagcagctcagaggaggtgtcctggatttcctggttctgtgggctccgtggcaatgaattctttgtgaagtggatgaagactacatccaggacaaatttaatcttactggactcaatgagcaggtccctcactatygacaagctctagacatgatcttggacctggagcctgatgaagaactggaagacaaccccaaccagagtgacctgattgagcaggcagccgagatgctttatggattgatccacgcccgctacatccttaccaaccgtggcatcgcccagatggtgaggcctctctgctcctacctgcctccttctgagcagtaagagacacaggttcctgcagcaagaagtcatgtttaagccctgtttaaggaagctagctgagaagaggggaagaaccccagaacttgggcctgggaattgaattctgattgggggtcatcctgaagggattgttttcagggagggagacagaccttgaatcagagagttgtgatagactgcctcttcctcaaggaacaaacaacaaatggctctgatggtttgtagcctgcctaattggaagaaaggcaacacagaagtttgagagcccarctagtccagagaaggggcctctggacagaggtgggaggagtgggggacagagtggtatgggttgggctgcgaagggagttgcctcttctttacatctacctgccaaccccttccattgtattcacctcagttggaaaagtaccagcaaggagactttggttactgtcctcgtgtgtactgtgagaaccagccaatgcttcccattggtgagtgttgaagaagggaaaggaaagcaccgtgtggcagtcttatgggaaggagttggggctcaacacattggagcctgagtcctgaggggaggttaggtaggaatagggggatacctggcctgctgagtctggctgtctcccaggcctttcagacatcccaggtgaagccatggtgaagctctactgccccaagtgcatggatgtgtacacacccaagtcatcaagacaccatcacacggatggcgcctacttcggcactggtttccctcacatgctcttcatggtgcatcccgagtaccggcccaagagacctgccaaccagtttgtgcccag

SEQ ID NO: 124 - DNA, 1282 bp, Homo sapiens
gcttctcgttgtgccccgcccgcaagcgccctcctccgggccttcgtgacagccaggtcgtgcgcgggtcatcctgggattggtagttcgctttctctcatttagccagtttctttctctaccggggactccgtgtcccggcatccaccgcggcacctgacccttggcgcttgcgtgttgccctcttccccaccctccctaatttccactccccccaccccacttcgcctgccgcggtcgggtccgcggcctgcgctgtagcggtcgccgccgttccctggaagtagcaacttccctaccccaccccagtcctggtccccgtccagccgctgacgtgaagatgagcagctcagaggaggtgtcctggatttcctggttctgtgggctccgtggcaatgaattctttgtgaagtggatgaagactacatccaggacaaatttaatcttactggactcaatgagcaggtccctcactatygacaagctctagacatgatcttggacctggagcctgatgaagaactggaagacaaccccaaccagagtgacctgattgagcaggcagccgagatgctttatggattgatccacgcccgctacatccttaccaaccgtggcatcgcccagatgttggaaaagtaccagcaaggagactttggttactgtcctcgtgtgtactgtgagaaccagccaatgcttcccattggtgagtgttgaagaagggaaaggaaagcaccgtgtggcagtcttatgggaaggagttggggctcaacacattggagcctgagtcctgaggggaggttaggtaggaatagggggatacctggcctgctgagtctggctgtctcccaggcctttcagacatcccaggtgaagccatggtgaagctctactgccccaagtgcatggatgtgtacacacccaagtcatcaagacaccatcacacggatggcgcctacttcggcactggtttccctcacatgctcttcatggtgcatcccgagtaccggcccaagagacctgccaaccagtttgtgcccaggctctacggtttcaagatccatccgatggcctaccagctgcagctccaagccgccagcaacttcaagagcccagtcaagacgattcgctgattccctcccccacctgtcctgcagtctttgawttttcctttcttttttgccaccctttcaggaaccctgtatggtttttagtttaaattaaaggagtcgttatygtggtgggaatatgaaataaagtagaagaaaaggccatgagctag

SEQ ID NO: 125 - DNA, 1652 bp, Homo sapiens
ccacgcccggctaatttttggtatttgtagtagaaacggggtttcaccatgttagccaggctgggtgcgaactcctgacctcaggtagtccacccgccttggcctcccaaagtgctgggattacaggcgtgagccaccgcagtccggccctaatatagtttttaaattcattcattccaaggcttttgggaggcgctcagtggcgtgcagtttcctctcgaatttctttcttcccgcagtctttctgggcgggcgtctcccgtctgtttcttcccatcttcccccttatcatcctgggactggataattcttgaatagtctgggaggtagcagggaacccgagttcggagcctcgaccagaacctccagacgggaaattggagcaggtggtgtcgttccaggacgctgaggaccacctcctcccctaacgcacagcccaacgatcctaaaagtaaaaaccctgagtttctgagtcaagactgagctggtggggtggggaccgagtaggcgtggatggggagcccagcgggtccccagcggagaaaatgggtgagacgcctggggccgcggtctccagaattcgcctgggagggagagtggcgctacggcgccgccttcctggggagccgcttcgggctccggatgtccgctggggcccgacgcttgggtcccgacgcgcggttcgcactttccaggtttcttccccagggaacagagcttgagcsgggggccacccccccgtcctaccggagttctgaggtgcggtcaggcgcggagagcggacgcccagcgccagattctgtgggctccggagttcaggcccactgagccgcagctgagcacaggcggggcaggaaaaaggatgaggtgagggaaggcgctgggttcctggaaccccaagggagcactgagctgagtaagtttgttcctgtcaattgggaaccccctcaaccacttccaytccccaaatacctgygctgctaccgatgcctcttggagaccaaggagttagggtgccttctgggatctgacatctgcctcaccccagctggcagcagctgcatcactctccacaaaaagaacagcagcggttctgacgtcatggtgagtgactgccgaagtaaggagcagatgagtgattgttcaaatacccgaacttctccggtgtctggcttctggatattctctcaatactgcttcctggatttctgcaatgaccctcaaaacagagggctctatactccttagtgtgactgcagcaaactttggtgtaaaattccaccagtttccagccaccttcctgacttctatctgggcttggccaggacttctagtccctcayaccagccctccttgcctccctccagccactggaccccagccttggctcttcctcttggttgacgcccttcagcacacttactgctactctgtacccccagccctactgcccaccaggtttcctctcttgtcccctagtccctggatgtttctcccaaataaatttgtgtgtaaactgtttggtatgtctctttcttctggtggaggtgaaggctgagggaggtgcacctgcctaactgccctaccatgggtcaggtaagggacccccagctctgctgagctgtcctcttgtcctgccttggtatgtgatt

SEQ ID NO: 126 - DNA, 851 bp, Homo sapiens
atgcagaccttcccagttgctggggcgctggaccctgctatactggacacaagcagcccccaagccctctacacggtcctcttaatagtgctggtcatgatgagcttggtgtttggtaagtttgttcctgtcaattgggaaccccctcaaccacttccaytccccaaatacctgygctgctaccgatgcctcttggagaccaaggagttagggtgccttctgggatctgacatctgcctcaccccagctggcagcagctgcatcactctccacaaaaagaacagcagcggttctgacgtcatggtgagtgactgccgaagtaaggagcagatgagtgattgttcaaatacccgaacttctccggtgtctggcttctggatattctctcaatactgcttcctggatttctgcaatgaccctcaaaacagagggctctatactccttagtgtgactgcagcaaactttggtgtaaaattccaccagtttccagccaccttcctgacttctatctgggcttggccaggacttctagtccctcayaccagccctccttgcctccctccagccactggaccccagccttggctcttcctcttggttgacgcccttcagcacacttactgctactctgtacccccagccctactgcccaccaggtttcctctcttgtcccctagtccctggatgtttctcccaaataaatttgtgtgtaaactgtttggtatgtctctttcttctggtggaggtgaaggctgagggaggtgcacctgcctaactgccctaccatgggtcaggtaagggacccccagctctgctgagctgtcctcttgtcctgccttggtatgtgatt

SEQ ID NO: 127 - protein, 252 aa, Homo sapiens
MEQRNRLGALGYLPPLLLHALLLFVADAAFTEVPKDVTVREGDDIEMPCAFRASGATSYSLEIQWWYLKEPPRELLHELALSVPGARSKVTNKDATKISTVRVQGNDISHRLRLSAVRLQDEGVYECRVSDYSDDDTQEHKAQAMLRVLSRFAPPNMQAAEAVSHIQSSGPRRHGPASAANANNAGAASRYWLDPKASSVLDATQEPTRLSLRLLGKGCITSQCPELSCWHQVLLSALRGSKPAALLGTTAA

SEQ ID NO: 128 - protein, 285 aa, Homo sapiens
MEQRNRLGALGYLPPLLLHALLLFVADAAFTEVPKDVTVREGDDIEMPCAFRASGATSYSLEIQWWYLKEPPRELLHELALSVPGARSKVTNKDATKISTVRVQGNDISHRLRLSAVRLQDEGVYECRVSDYSDDDTQEHKAQAMLRVLSRFAPPNMQAAEAVSHIQSSGPRRHGPASAANANNAGAASRTTSEPGRGDKSPPPGSPPAAIDPAVPEAAAASAAHTPTTTVAAAAAASSASPPSGQAVLLRQRHGSGTGRSYTTDPLLSLLLLALHKFLRLLLGH

SEQ ID NO: 129 - protein, 268 aa, Homo sapiens
MFRMLNSSFEDDPFFSESILAHRENMRQMIRSFSEPFGRDLLSISDGRGRAHNRRGHNDGEDSLTHTDVSSFQTMDQMVSNMRNYMQKLERNFGQLSVDPNGHSFCSSSVMTYSKIGDEPPKVFQASTQTRRAPGGIKETRKAMRDSDSGLEKMAIGHHIHDRAHVIKKSKNKKTGDEEVNQEFINMNESDAHAFDEEWQSEVLKYKPGRHNLGNTRMRSVGHENPGSRELKRREKPQQSPAIEHGRRSNVLGDKLHIKGSSVKSNKK

SEQ ID NO: 130 - protein, 283 aa, Homo sapiens
MFRMLNSSFEDDPFFSESILAHRENMRQMIRSFSEPFGRDLLSISDGRGRAHNRRGHNDGEDSLTATSCSLVPFGDFGGMHTDVSSFQTMDQMVSNMRNYMQKLERNFGQLSVDPNGHSFCSSSVMTYSKIGDEPPKVFQASTQTRRAPGGIKETRKAMRDSDSGLEKMAIGHHIHDRAHVIKKSKNKKTGDEEVNQEFINMNESDAHAFDEEWQSEVLKYKPGRHNLGNTRMRSVGHENPGSRELKRREKPQQSPAIEHGRRSNVLGDKLHIKGSSVKSNKK

SEQ ID NO: 131 - protein, 891 aa, Homo sapiens [sequence omitted]

SEQ ID NO: 132 - protein, 1359 aa, Homo sapiens
MYSVEDLLISHGYKLSRDPPASREDNPKGRQAARTGTRAGQGLQNGHEDGPAALAHRKTSAGKGHVSDSESRRSTPRGHGEPQSTSASRTSEAGFCNQPPSAWSSHPPTGNDQAYRRRGRQEARSQKPREHENLEARGMAQAHSLPVHVREGPWEVGGRSEHVMKKPVWEEELRMSGPAKWQNVSLESWNQPRKLGRQMSDGDGERLFQDLYPFIQGEHVLNSQNKGKSRSLPRVLSPESLSCTEIPIPLNERHSPKMPPYPPTCAPNLDSTRNSEKSGCSAPFPRPKFGRPLKPPSYSSHQQSRGGADSSDSQDSQQMDAYVPRHELCLSDPGLEPPVYVPPPSYRSPPQNIPNPYLEDTVPINVCGGHSQQQSPTEKAGASGQPPSGPPGTGNEYGVSPRLPQGLPAHPRPVTAYDGFVQYIPFDDPRLRHFKLAQPQGFCEDIKLDDKSYNSSPVTAQEPAHGGMQPDGAIWNPQSLIPPSGDERGLVLADSSPRWLWGQPPGDGENSGLPNQRDRCVARGQWPDVRGSQHGHTGRQVSSPYSQGESTCETQTKLKKFQTGTRTKKSSKKKMNETIFCLVSIPVKSESHLPDRDMDNNDLKPSADQKNGSDKSPALQEQSLLSMSSTDLELQALTGSMGGRTEFQKQDLGEPEEDRQTNDLSFIHLTKHRELKHSGSWPGHRYRDQQTQTSFSEEPQSSQLLPGAKLGGPSRAALSPKCSDPAASEAQTHTAFPTGDHKQRPSARNLKGHRSLSPSSNSAFSRTSLSVDQAPTPKAGRSQPCVDVHGLGAHPGPKREVVKGEPTGPCNSKQLFGQFLLKPVSRRPWDLISQLESFNKELQEEEESSSSSSSSSSSSEESEAEPQQENRAHCRQEDVGFRGNSPEMRVEPQPRMWVPESPVCRSGRGESKSESWSEELQPGHPRAWPPSPGRFRVEEGGGAPFCSADGSTSAEKRHLEVSNGMDELAGSPFPVTRMSSRSSDAKPLPASYPAEPREPQESPKITSAFSSVKPSEAVPRKFDSGGERGAGLPLSLSNKNRGLSAPDLRSVGLTPGQEQGASELEGSLGEASTIEIPPGESLQARAARILGIEVAVESLLPGIRRAGQNQPAEPDASACTPESPQEELLSRPAPADVPRVSTDAFYGRRKCGWTKSPLFVGDRDSARRAPQAFEHSDVDGVVTSTDPVPEPEPSPLESKFFEQKDVETKPPFRSTLFHFVERTPSVAGSEKRLRSPSKVIESLQEKLASPPRRADPDRLMRMKEVSSVSRMRVLSFRNADSQEDAEELKATTRGQAGLPGGLVSPGSGDRAQRLGHSLSVSKDSISREEKEHPAAQKEKSMDQDFWCPDSYDPSRVERV

SEQ ID NO: 133 - protein, 140 aa, Homo sapiens
MAWTRAEQCGWQEACSDLEVLPMGPADEKPSPLNGSRRERRKNIPSDFEPGLEADTMAHAEKKLLPTRLPAKFCRLKMFGEFGQSSQFLDAYLRPSSVKFIQLISVNKKLLNVNSKRQCSFTSESTECITEAACAATGVQ

SEQ ID NO: 134 - protein, 106 aa, Homo sapiens
VHLCQVCSHLSLFESTCQVLSPPLSAVVLKQPETLTDESFSSLAAPHPPTSLNPSHSFQTSTTSRDIGIAAKFIGARTSKVRTAGSGAKIAAVFGSLTIDYAKNPV

SEQ ID NO: 135 - protein, 234 aa, Homo sapiens [sequence omitted]

SEQ ID NO: 136 - protein, 79 aa, Homo sapiens
MGVHNLFTVTQFILIGLSYFSNEHYLLFVALAIICQVFLVRSGDILLAIGTVIKLHTTHVLFFGKCVHLRHIVFISYYT

SEQ ID NO: 137 - protein, 307 aa, Homo sapiens
MNHSVVTEFIILGLTKKPELQGIIFLFFLIVYLVAFLGNMLIIIAKIYNNTLHTPMYVFLLTLAVVDIICTTSIIPKMLGTMLTSENTISYAGCMSQLFLFTWSLGAEMVLFTTMAYDRYVAICFPLHYSTVMNHHMCVALLSMVMAIAVTNSWVHTALIMRLTFCGPNTIDHFFCEIPPLLALSCSPVRINEVMVYVADITLAIGDFILTCISYGFIIVAILRIRTVEGKRKAFSTCSSHLTVVTLYYSPVIYTYIRPASSYTFERDKVVAALYTLVTPTLNPMVYSFQNREMQAGIRKVFAFLKH

SEQ ID NO: 138 - protein, 437 aa, Homo sapiens [sequence omitted]

SEQ ID NO: 139 - protein, 552 aa, Homo sapiens [sequence omitted]

SEQ ID NO: 140 - protein, 801 aa, Homo sapiens
MLQNVTPHNKLPGEGNAGLLGLGPEAAAPGKRIRKPSLLYEGFESPTMASVPALQLTPANPPPPEVSNPKKPGRVTNQLQYLHKVVMKALWKHQFAWPFRQPVDAVKLGLPDYHKIIKQPMDMGTIKRRLENNYYWAASECMQDFNTMFTNCYIYNKPTDDIVLMAQTLEKIFLQKVASMPQEEQELVVTIPKNSHKKGAKLAALQGSVTSAHQVPAVSSVSHTALYTPPPEIPTTVLNIPHPSVISSPLLKSLHSAGPPLLAVTAAPPAQPLAKKKGVKRKADTTTPTPTAILAPGSPASPPGSLEPKAARLPPMRRESGRPIKPPRKDLPDSQQQHQSSKKGKLSEQLKHCNGILKELLSKKHAAYAWPFYKPVDASALGLHDYHDIIKHPMDLSTVKRKMENRDYRDAQEFAADVRLMFSNCYKYNPPDHDVVAMARKLQDVFEFRYAKMPDEPLEPGPLPVSTAMPPGLAKSSSESSSEESSSESSSEEEEEEDEEDEEEEESESSDSEEERAHRLAELQEQLRAVHEQLAALSQGPISKPKRKREKKEKKKKRKAEKHRGRAGADEDDKGPRAPRPPQPKKSKKASGSGGGSAALGPSGFGPSGGSGTKLPKKATKTAPPALPTGYDSEEEEESRPMSYDEKRQLSLDINKLPGEKLGRVVHIIQAREPSLRDSNPEEIEIDFETLKPSTLRELERYVLSCLRKKPRKPYTIKKPVGKTKEELALEKKRELEKRLQDVSGQLNSTKKPPKKANEKTESSSAQQVAVSRLSASSSSSDSSSSSSSSSSSDTSDSDSG

SEQ ID NO: 141 - protein, 801 aa, Homo sapiens; identical to SEQ ID NO: 140

SEQ ID NO: 142 - protein, 166 aa, Homo sapiens
MLLILLSVALLAFSSAQDLDEDVSQEDVPLVISDGGDSEQFIDEERQGPPLGGQQSQPSAGDGNQNDGPQQGPPQQGGQQQQGPPPPQGKPQGPPQQGGHPPPPQGRPQGPPQQGGHPRPPRGRPQGPPQQGGHQQGPPPPPPGKPQGPPPQGGRPQGPPQGQSPQ

SEQ ID NO: 143 - protein, 100 aa, Homo sapiens
MGRWPPAVTLTCRPTATVPWSPGTTSAETTALARSLCSAGTQPAPSTTSLPSWRSAAPLAWPLQLSGQWWSAGACFLDLPSLALCWPGDSGDAEWPEAGS

SEQ ID NO: 144 - protein, 101 aa, Homo sapiens
MGGRPGPREGRNAVPSRRLRWVAAAAPGVCSARGRSERTAPSEQVPAARRAHTLASPQRPKVTTVPGGFALLEKCILTVEFRRRESVNSPYHVDSPVWSRI

SEQ ID NO: 145 - protein, 290 aa, Homo sapiens [sequence omitted]

SEQ ID NO: 146 - protein, 509 aa, Homo sapiens
MAERAALEELVKLQGERVRGLKQQKASAELIEEEVAKLLKLKAQLGPDESKQKFVLKTPKGTRDYSPRQMAVREKVFDVIIRCFKRHGAEVIDTPVFELKETLMGKYGEDSKLIYDLKDQGGELLSLRYDLTVPFARYLAMNKLTNIKRYHIAKVYRRDNPAMTRGRYREFYQCDFDIAGNFDPMIPDAECLKIMCEILSSLQIGDFLVKVNDRRILDGMFAICGVSDSKFRTICSSVDKLDKVSWEEVKNEMVGEKGLAPEVADRIGDYVQQHGGVSLVEQLLQDPKLSQNKQALEGLGDLKLLFEYLTLFGIDDKISFDLSLARGLDYYTGVIYEAVLLQTPAQAGEEPLGVGSVAAGGRYDGLVGMFDPKGRKVPCVGLSIGVERIFSIVEQRLEALEEKIRTTETQVLVASAQKKLLEERLKLVSELWDAGIKAELLYKKNPKLLNQLQYCEEAGIPLVAIIGEQELKDGVIKLRSVTSREEVDVRREDLVEEIKRRTGQPLCIC

SEQ ID NO: 147 - protein, 440 aa, Homo sapiens
MAVREKVFDVIIRCFKRHGAEVIDTPVFELKETLMGKYGEDSKLIYDLKDQGGELLSLRYDLTVPFARYLAMNKLTNIKRYHIAKVYRRDNPAMTRGRYREFYQCDFDIAGNFDPMIPDAECLKIMCEILSSLQIGDFLVKVNDRRILDGMFAICGVSDSKFRTICSSVDKLDKVSWEEVKNEMVGEKGLAPEVADRIGDYVQQHGGVSLVEQLLQDPKLSQNKQALEGLGDLKLLFEYLTLFGIDDKISFDLSLARGLDYYTGVIYEAVLLQTPAQAGEEPLGVGSVAAGGRYDGLVGMFDPKGRKVPCVGLSIGVERIFSIVEQRLEALEEKIRTTETQVLVASAQKKLLEERLKLVSELWDAGIKAELLYKKNPKLLNQLQYCEEAGIPLVAIIGEQELKDGVIKLRSVTSREEVDVRREDLVEEIKRRTGQPLCIC

SEQ ID NO: 148 - protein, 388 aa, Homo sapiens
MDRTCEERPAEDGSDEEDPDSMEAPTRIRDTPEDIVLEAPASGLAFHPARDLLAAGDVDGDVFVFSYSCQEGETKELWSSGHHLKACRAVAFSEDGQKLITVSKDKAIHVLDVEQGQLERRVSKAHGAPINSLLLVDENVLATGDDTGGIRLWDQRKEGPLMDMRQHEEYIADMALDPAKKLLLTASGDGCLGIFNIKRRRFELLSEPQSGDLTSVTLMKVQLVMWGKKVACGSSEGTIYLFNWNGFGATSDRFALRAESIDCMVPVTESLLCTGSTDGVIRAVNILPNRVVGSVGQHTGEPVEELALSHCGRFLASSGHDQRLKFWDMAQLRAVVVDDYRRRKKKGGPLRALSSKTWSTDDFFAGLREEGEDSMAQEEKEETGDDSD

SEQ ID NO: 149 - protein, 222 aa, Homo sapiens
MDMRQHEEYIADMALDPAKKLLLTASGDGCLGIFNIKRRRFELLSEPQSGDLTSVTLMKWGKKVACGSSEGTIYLFNWNGFGATSDRFALRAESIDCMVPVTESLLCTGSTDGVIRAVNILPNRVVGSVGQHTGEPVEELALSHCGRFLASSGHDQRLKFWDMAQLRAVVVDDYRRRKKKGGPLRALSSKTWSTDDFFAGLREEGEDSMAQEEKEETGDDSD

SEQ ID NO: 150 - protein, 259 aa, Homo sapiens
MDRTCEERPAEDGSDEEDPDSMEAPTRIRDTPEDIVLEAPASGLAFHPARDLLAAGDVDGDVFVFSYSCQEGETKELWSSGHHLKACRAVAFSEDGQKLITVSKDKAIHVLDVEQGQLERRVSKAHGAPINSLLLVDENVLATGDDTGGIRLWDQRKEGPLMDMRQHEEYIADMALDPAKKLLLTASGDGCLGIFNIKRRRFELLSEPQSGDLTSVTLMKVQLVMVGWRGVCWGLSLRQLPHCFLYFPAVGEEGSLWLQ

SEQ ID NO: 151 - protein, 557 aa, Homo sapiens [sequence omitted]

SEQ ID NO: 152 - protein, 559 aa, Homo sapiens [sequence omitted]

SEQ ID NO: 153 - protein, 394 aa, Homo sapiens [sequence omitted]

SEQ ID NO: 154 - protein, 303 aa, Homo sapiens [sequence omitted]

SEQ ID NO: 155 - protein, 134 aa, Homo sapiens [sequence omitted]

SEQ ID NO: 156 - protein, 1169 aa, Homo sapiens
MNYCRNPDAVAAPYCYTRDPGVRWEYCNLTQCSDAEGTAVAPPTVTPVPSLEAPSEQAPTEQRPGVQECYHGNGQSYQGTYFITVTGRTCQAWSSMTPHSHSRTPAYYPNAGLIKNYCRNPDPVAAPWCYTTDPSVRWEYCNLTRCSDAEWTAFVPPNVILAPSLEAFFEQALTEETPGVQDCYYHYGQSYRGTYSTTVTGRTCQAWSSMTPHQHSRTPENYPNAGLTRNYCRNPDAEIRPWCYTMDPSVRWEYCNLTQCLVTESSVLATLTVVPDPSTEASSEEAPTEQSPGVQDCYHGDGQSYRGSFSTTVTGRTCQSWSSMTPHWHQRTTEYYPNGGLTRNYCRNPDAEISPWCYTMDPNVRWEYCNLTQCPVTESSVLATSTAVSEQAPTEQSPTVQDCYHGDGQSYRGSFSTTVTGRTCQSWSSMTPHWHQRTTEYYPNGGLTRNYCRNPDAEIRPWCYTMDPSVRWEYCNLTQCPVMESTLLTTPTVVPVPSTELPSEEAPTENSTGVQDCYRGDGQSYRGTLSTTITGRTCQSWSSMTPHWHRRIPLYYPNAGLTRNYCRNPDAEIRPWCYTMDPSVRWEYCNLTRCPVTESSVLTTPTVAPVPSTEAPSEQAPPEKSPVVQDCYHGDGRSYRGISSTTVTGRTCQSWSSMIPHWHQRTPENYPNAGLTENYCRNPDSGKQPWCYTTDPCVRWEYCNLTQCSETESGVLETPTVVPVPSMEAHSEAAPTEQTPVVRQCYHGNGQSYRGTFSTTVTGRTCQSWSSMTPHRHQRTPENYPNDGLTMNYCRNPDADTGPWCFTMDPSIRWEYCNLTRCSDTEGTVVAPPTVIQVPSLGPPSEQDCMFGNGKGYRGKKATTVTGTPCQEWAAQEPHRHSTFIPGTNKWAGLEKNYCRNPDGDINGPWCYTMNPRKLFDYCDIPLCASSSFDCGKPQVEPKKCPGSIVGGCVAHPHSWPWQVSLRTRFGKHFCGGTLISPEWVLTAAHCLKKSSRPSSYKVILGAHQEVNLESHVQEIEVSRLFLEPTQADIALLKLSRPAVITDKVMPACLPSPDYMVTARTECYITGWGETQGTFGTGLLKEAQLLVIENEVCNHYKYICAEHLARGTDSCQGDSGGPLVCFEKDKYILQGVTSWGLGCARPNKPGVYARVSRFVTWIEGMMRNN

SEQ ID NO: 157 - protein, 908 aa, Homo sapiens
MVCEGKRSASCPCFFLLTAKFYWILTMMQRTHSQEYAHSIRVDGDIILGGLFPVHAKGERGVPCGELKKEKGIHRLEAMLYAIDQINKDPDLLSNITLGVRILDTCSRDTYALEQSLTFVQALIEKDASDVKCANGDPPIFTKPDKISGVIGAAASSVSIMVANILRLFKIPQISYASTAPELSDNTRYDFFSRVVPPDSYQAQAMVDIVTALGWNYVSTLASEGNYGESGVEAFTQISREIGGVCIAQSQKIPREPRPGEFEKIIKRLLETPNARAVIMFANEDDIRRILEAAKKLNQSGHFLWIGSDSWGSKIAPVYQQEEIAEGAVTILPKRASIDGFDRYFRSRTLANNRRNVWFAEFWEENFGCKLGSHGKRNSHIKKCTGLERIARDSSYEQEGKVQFVIDAVYSMAYALHNMHKDLCPGYIGLCPRMSTIDGKELLGYIRAVNFNGSAGTPVTFNENGDAPGRYDIFQYQITNKSTEYKVIGHWTNQLHLKVEDMQWAHREHTHPASVCSLPCKPGERKKTVKGVPCCWHCERCEGYNYQVDELSCELCPLDQRPNMNRTGCQLIPIIKLEWHSPWAVVPVFVAILGIIATTFVIVTFVRYNDTPIVRASGRELSYVLLTGIFLCYSITFLMIAAPDTIICSFRRVFLGLGMCFSYAALLTKTNRIHRIFEQGKKSVTAPKFISPASQLVITFSLISVQLLGVFVWFVVDPPHIIIDYGEQRTLDPEKARGVLKCDISDLSLICSLGYSILLMVTCTVYAIKTRGVPETFNEAKPIGFTMYTTCIIWLAFIPIFFGTAQSAEKMYIQTTTLTVSMSLSASVSLGMLYMPKVYIIIFHPEQNVQKRKRSFKAVVTAATMQSKLIQKGNDRPNGEVKSELCESLETNTSSTKTTYISYSNHSI

SEQ ID NO: 158 - protein, 906 aa, Homo sapiens
MVCEGKRSASCPCFFLLTAKFYWILTMMQRTHSQEYAHSIRVDGDIILGGLFPVHAKGERGVPCGELKKEKGIHRLEAMLYAIDQINKDPDLLSNITLGVRILDTCSRDTYALEQSLTFVQALIEKDASDVKCANGDPPIFTKPDKISGVIGAAASSVSIMVANILRLFKIPQISYASTAPELSDNTRYDFFSRVVPPDSYQAQAMVDIVTALGWNYVSTLASEGNYGESGVEAFTQISREIGGVCIAQSQKIPREPRPGEFEKIIKRLLETPNARAVIMFANEDDIRRILEAAKKLNQSGHFLWIGSDSWGSKIAPVYQQEEIAEGAVTILPKRASIDGFDRYFRSRTLANNRRNVWFAEFWEENFGCKLGSHGKRNSHIKKCTGLERIARDSSYEQEGKVQFVIDAVYSMAYALHNMHKDLCPGYIGLCPRMSTIDGKELLGYIRAVNFNGSAGTPVTFNENGDAPGRYDIFQYQITNKSTEYKVIGHWTNQLHVEDMQWAHREHTHPASVCSLPCKPGERKKTVKGVPCCWHCERCEGYNYQVDELSCELCPLDQRPNMNRTGCQLIPIIKLEWHSPWAVVPVFVAILGIIATTFVIVTFVRYNDTPIVRASGRELSYVLLTGIFLCYSITFLMIAAPDTIICSFRRVFLGLGMCFSYAALLTKTNRIHRIFEQGKKSVTAPKFISPASQLVITFSLISVQLLGVFVWFVVDPPHIIIDYGEQRTLDPEKARGVLKCDISDLSLICSLGYSILLMVTCTVYAIKTRGVPETFNEAKPIGFTMYTTCIIWLAFIPIFFGTAQSAEKMYIQTTTLTVSMSLSASVSLGMLYMPKVYIIIFHPEQNVQKRKRSFKAVVTAATMQSKLIQKGNDRPNGEVKSELCESLETNTSSTKTTYISYSNHSI

SEQ ID NO: 159 - protein, 40 aa, Homo sapiens
MTPNVPFNGRILSSTGISPVSETFSGSQKLISTRCEGGHT

SEQ ID NO: 160 - protein, 2260 aa, Homo sapiens [sequence omitted]

SEQ ID NO: 161 - protein, 2347 aa, Homo sapiens [sequence omitted]

SEQ ID NO: 162 - protein, 241 aa, Homo sapiens
MDDKKKKRSPKPCLAQPAQAPGTLRRVPVPTSHSGSLALGLPHLPSPKQRAKFKRVGKEKCRPVLAGGGSGSAGTPLQHSFLTEVTDVYEMEGGLLNLLNDFHSGRLQAFGKECSFEQLEHVREMQEKLARLHFSLDVCGEEEDDEEEEDGVTEGLPEEQKKTMADRNLDQLLSNLEDLSNSMYPFQGTRLCVCVPERSVSSSPALQEYSHTTNFPTSCSPVRFSHRLPKPRYRNLEFPQN

SEQ ID NO: 163 - protein, 798 aa, Homo sapiens
MAWDMCNQDSESVWSDIECAALVGEDQPLCPDLPELDLSELDVNDLDTDSFLGGLKWCSDQSEIISNQYNNEPSNIFEKIDEENEANLLAVLTETLDSLPVDEDGLPSFDALTDGDVTTDNEASPSSMPDGTPPPQEAEEPSLLKKLLLAPANTQLSYNECSGLSTQNHANHNHRIRTNPAIVKTENSWSNKAKSICQQQKPQRRPCSELLKYLTTNDDPPHTKPTENRNSSRDKCTSKKKSHTQSQSQHLQAKPTTLSLPLTPESPNDPKGSPFENKTIERTLSVELSGTAGLTPPTTPPHKANQDNPFRASPKLKSSCKTVVPPPSKKPRYSESSGTQGNNSTKKGPEQSELYAQLSKSSVLTGGHEERKTKRPSLRLFGDHDYCQSINSKTEILINISQELQDSRQLENKDVSSDWQGQICSSTDSDQCYLRETLEASKQVSPCSTRKQLQDQEIRAELNKHFGHPSQAVFDDEADKTGELRDSDFSNEQFSKLPMFINSGLAMDGLFDDSEDESDKLSYPWDGTQSYSLFNVSPSCSSFNSPCRDSVSPPKSLFSQRPQRMRSRSRSFSRHRSCSRSPYSRSRSRSPGSRSSSRSCYYYESSHYRHRTHRNSPLYVRSRSRSPYSRRPRYDSYEEYQHERLKREEYRREYEKRESERAKQRERQRQKAIEERRVIYVGKIRPDTTRTELRDRFEVFGEIEECTVNLRDDGDSYGFITYRYTCDAFAALENGYTLRRSNETDFELYFCGRKQFFKSNYADLDSNSDDFDPASTKSKYDSLDFDSLLKEAQRSLRR

SEQ ID NO: 164 - protein, 798 aa, Homo sapiens; identical to SEQ ID NO: 163

SEQ ID NO: 165 - protein, 61 aa, Homo sapiens
MFPGILSQLGADSLTSLRKLAKQFPWQVLNSKAPNPEDNDEEEDVSDLVEYFGEASKNEAN

SEQ ID NO: 166 - protein, 163 aa, Homo sapiens
MGDSGSTRLPWSLGLCGSQVVRQLEQKWKWLKMLIAQPRLCLLQAKPGLQSLLCSPQGPGGRDQGAGGFLGQGSSPLRHQALALEELSPGVGSLEGTGWVQVKPDSLWKGIFYEWMISRLRVGCVLVLSKSLTKTLPSQALKEMRQSPSLQDPLWMFLHLPDF

SEQ ID NO: 167 - protein, 628 aa, Homo sapiens [sequence omitted]

SEQ ID NO: 168 - protein, 157 aa, Homo sapiens
MRKMQLSGNGLEEQAAQHLAELLLAHTDLKSLDLSYNQLNDQADLCMGLQGFLIFHSFGGGTGSGFVSLLMKRLSVDYGKKSKLEFAICPAPQVSMAMTEPYNSILTTYTTLEHSDCAFIVDSKATYDMSAQPGHRVSHVHQPQSSGQIVSSITASL

SEQ ID NO: 169 - protein, 157 aa, Homo sapiens; identical to SEQ ID NO: 168

SEQ ID NO: 170 - protein, 166 aa, Homo sapiens
MLLILLSVALLAFSSAQDLNEDVSQEDVPLVISDGGDSEQFIDEERQGPPLGGQQSQPSAGDGNQDDGPQQGPPQQGGQQQQGPPPPQGKPQGPPQQGGHPPPPQGRPQGPPQQGGHPRPPRGRPQGPPQQGGHQQGPPPPPPGKPQGPPPQGGRPQGPPQGQSPQ

SEQ ID NO: 171 - protein, 166 aa, Homo sapiens; identical to SEQ ID NO: 170

SEQ ID NO: 172 - protein, 244 aa, Homo sapiens
MRVGVSLCYPGWSSVVGSWLTAVWNSWAQTILPPQPSAAEEYFACWNLLYLLKSGSFHRELTRFSQHKVGSDTRASCKMLLILLSVALLAFSSAQDLNEDVSQEDVPLVISDGGDSEQFIDEERQGPPLGGQQSQPSAGDGNQDDGPQQGPPQQGGQQQQGPPPPQGKPQGPPQQGGHPPPPQGRPQGPPQQGGHPRPPRGRPQGPPQQGGHQQGPPPPPPGKPQGPPPQGGRPQGPPQGQSPQ

SEQ ID NO: 173 - protein, 244 aa, Homo sapiens; identical to SEQ ID NO: 172

SEQ ID NO: 174 - protein, 299 aa, Homo sapiens [sequence omitted]

SEQ ID NO: 175 - protein, 178 aa, Homo sapiens
PTGCFTLVSDEELKRRVAEELALEQAKKESEDQKRLKQAKELDRERAAANEQLTRAILRERICSEEERAKAKHLARQLEEKDRVLKKQDAFYKEQLARLEERSSEFYRVTTEQYQKAAEEVEAKFKRYESHPVCADLQAKILQCYRENTHQTLKCSALATQYMHCVNHAKQSMLEKGG

SEQ ID NO: 176 - protein, 227 aa, Homo sapiens
MGGTTSTRRVTFEADENENITVVKGIRLSENVIDRMKESSPSGSKSQRYSGAYGASVSDEELKRRVAEELALEQAKKESEDQKRLKQAKELDRERAAANEQLTRAILRERICSEEERAKAKHLARQLEEKDRVLKKQDAFYKEQLARLEERSSEFYRVTTEQYQKAAEEVEAKFKRYESHPVCADLQAKILQCYRENTHQTLKCSALATQYMHCVNHAKQSMLEKGG

SEQ ID NO: 177 - protein, 1106 aa, Homo sapiens
MSGTSSHESFYDSLSDMQEESKNTDFFPGLSAFLSQEEINKSLDLARRAIADSETEDFDSEKEISQIFSTSPASLCEHPSHKETKLGEHASRRPQDNRSTPVQPLAEKQTKSISSPVSKRKPAMSPLLTRPSYIRSLRKAEKRGAKTPSTNVKPKTPHQRKGGPQSQLCDKAANLIEELTSIFKAAKPRNRSPNGESSSPDSGYLSPKNQPSALLSASASQSPMEDQGEMEREVKSPGARHCYQDNQDLAVPHNRKSHPQPHSALHFPAAPRFIQKLRSQEVAEGSRVYLECRVTGNPTPRVRWFCEGKELHNTPDIQIHCEGGDLHTLIIAEAFEDDTGRYTCLATNPSGSDTTSAEVFIEGASSTDSDSESLAFKSRAGAMPQAQKKTTSVSLTIGSSSPKTGVTTAVIQPLSVPVQQVHSPTSYLCRPDGTTTAYFPPVFTKELQNTAVAEGQVVVLECRVRGAPPLQVQWFRQGSEIQDSPDFRILQKKPRSTAEPEEICTLVIAETFPEDAGIFTCSARNDYGSATSTAQLVVTSANTENCSYESMGESNNDHFQHFPPPPPILETSSLELASKKPSEIQQVNNPELGLSRAALQMQFNAAERETNGVHPSRGVNGLINGKANSNKSLPTPAVLLSPTKEPPPLLAKPKLGFPKKASRTARIASDEEIQGTKDAVIQDLERKLRFKEDLLNNGQPRLTYEERMARRLLGADSATVFNIQEPEEETANQEYKVSSCEQRLISEIEYRLERSPVDESGDEVQYGDVPVENGMAPFFEMKLKHYKIFEGMPVTFTCRVAGNPKPKIYWFKDGKQISPKSDHYTIQRDLDGTCSLHTTASTLDDDGNYTIMAANPQGRISCTGRLMVQAVNQRGRSPRSPSGHPHVRRPRSRSRDSGDENEPIQERFFRPHFLQAPGDLTVQEGKLCRMDCKVSGLPTPDLSWQLDGKPVRPDSAHKMLVRENGVHSLIIEPVTSRDAGIYTCIATNRAGQNSFSLELVVAAKEAHKPPVFIEKLQNTGVADGYPVRLECRVLGVPPPQIFWKKENESLTHSTDRVSMHQDNHGYICLLIQGATKEDAGWYTVSAKNEAGIVSCTARLDVYISRH

SEQ ID NO: 178 - protein, 546 aa, Homo sapiens
MKNQDKKNGAAKQSNPKSSPGQPEAGPEGAQERPSQAAPAVEAEGPGSSQAPRKPEGAQARTAQSGALRDVSEELSRQLEDILSTYCVDNNQGGPGEDGAQGEPAEPEDAEKSRTYVARNGEPEPTPVVNGEKEPSKGDPNTEEIRQSDEVGDRDHRRPQEKKKAKGLGKEITLLMQTLNTLSTPEEKLAALCKKYAELLEEHRNSQKQMKLLQKKQSQLVQEKDHLRGEHSKAVLARSKLESLCRELQRHNRSLKEEGVQRAREEEEKRKEVTSHFQVTLNDIQLQMEQHNERNSKLRQENMELAERLKKLIEQYELREEHIDKVFKHKDLQQQLVDAKLQQAQEMLKEAEERHQREKDFLLKEAVESQRMCELMKQQETHLKQQLALYTEKFEEFQNTLSKSSEVFTTFKQEMEKMTKKIKKLEKETTMYRSRWESSNKALLEMAEEKTVRDKELEGLQVKIQRLEKLCRALQTERNDLNKRVQDLSAGGQGSLTDSGPERRPEGPGAQAPSSPRVTEAPCYPGAPSTEASGQTGPQEPTSARA

SEQ ID NO: 179 - protein, 546 aa, Homo sapiens; identical to SEQ ID NO: 178

SEQ ID NO: 180 - protein, 100 aa, Homo sapiens
SRFKQFSGLKAATIRKNKNTFDINIRSLNRTSCTQSLSMPHPFIHQPLYQCLLGSLTTISTCMSLPESLPLKCAQSYLCGWECWGFNVKGKNLPSMNDES

SEQ ID NO: 181 - protein, 104 aa, Homo sapiens
GNPLLLTWSTFSVTRKLSSLLPLLTFLNFSLGFPADRKITTLSISCPLRDSCLSASLHSQDLKLKLSLLSQFFVTFSFPIPTLQATSVRLLPPKLFWQMSPRTS

SEQ ID NO: 182 - protein, 494 aa, Homo sapiens
FGSQVSNKMKPVKHLLTTSNKSANVPALTTKKGLHNLPLSPELKEKHNAKLIHDKIEPMVLRSPPTGESILRYALPIPSSKTKNLLPEDEMIGKIIKHLKMVVSTLEETYGHCDQNGEEPFVKHEHEELSLSVGDDMNSFLTYCSQFAAQLEEALKEEQNILESLFKWFQWQVNQMEEISKDQTLLQAEPPKPDKTVILNIAEIVRLVQRFEELKNRLKQRSKSSVKVMLSKTMDKENRPEAVKSCEALAQKIEEFLEAHSTDEFKDVSATEPQTAHSMTNRFNAMLKVFENQANMLERAVNDQVLLDAEYKQMQCDFQLLSEEKLVLENELQKLKDKEKTKPTNNRTKKAVKTVKKKDKGKSEDSEKKMSPEKEFKIKEDLDQVQKVARLEIENKVLQEQLKQALQEAEKAKHQLNYFLNQEKLLKSEGKTETTMQVGNSQTKVKGEDSKNIPLEKETRKSLVSDSGGQRTSDKIQEYPQITAQSGRLIEKRC

SEQ ID NO: 183 - protein, 500 aa, Homo sapiens
MALMLSLVLSLLKLGSGQWQVFGPDKPVQALVGEDAAFSCFLSPKTNAEAMEVRFFRGQFSSVVHLYRDGKDQPFMQMPQYQGRTKLVKDSIAEGRISLRLENITVLDAGLYGCRISSQSYYQKAIWELQVSALGSVPLISITGYVDRDIQLLCQSSGWFPRPTAKWKGPQGQDLSTDSRTNRDMHGLFDVEISLTVQENAGSISCSMRHAHLSREVESRVQIGDTFFEPISWHLATKVLGILCCGLFFGIVGLKIFFSKFQWKIQAELDWRRKHGQAELRDARKHAVEVTLDPETAHPKLCVSDLKTVTHRKAPQEVPHSEKRFTRKSVVASQSFQAGKHYWEVDGGHNKRWRVGVCRDDVDRRKEYVTLSPDHGYWVLRLNGEHLYFTLNPRFISVFPRTPPTKIGVFLDYECGTISFFNINDQSLIYTLTCRFEGLLRPYIEYPSYNEQNGTPIVICPVTQESEKEASWQRASAIPETSNSESSSQATTPFLPRGEM

SEQ ID NO: 184 - protein, 347 aa, Homo sapiens
MALMLSLVLSLLKLGSGQWQVFGPDKPVQALVGEDAAFSCFLSPKTNAEAMEVRFFRGQFSSVVHLYRDGKDQPFMQMPQYQGRTKLVKDSIAEGRISLRLENITVLDAGLYGCRISSQSYYQKAIWELQVSALGSVPLISITGYVDRDIQLLCQSSGWFPRPTAKWKGPQGQDLSTDSRTNRDMHGLFDVEISLTVQENAGSISCSMRHAHLSREVESRVQIGDTFFEPISWHLATKVLGILCCGLFFGIVGLKIFFSKFQCKREREAWAGALFMVPAGTGSEMLPHPAASLLLVLASRGPGPKKENPGGTGLEKKARTGRIERRPETRSGGDSGSRDGSPEALRF

SEQ ID NO: 185 - protein, 140 aa, Homo sapiens
PVQGARCWLDARRNVRVFSGVCCGCGIHGYWAEPCGGCGAMEGLRSSVELDPELTPGKLDEEMVGLPPHDASPQVTFHSLDGKTVVCPHFMGLLLGLLLLLTLSVRNQLCVRGERQLAETLHSQVKEKSQLIGKKTDCRD

SEQ ID NO: 186 - protein, 196 aa, Homo sapiens [sequence omitted]

SEQ ID NO: 187 - protein, 100 aa, Homo sapiens; identical to SEQ ID NO: 180

SEQ ID NO: 188 - protein, 163 aa, Homo sapiens
TPRHDGAAPAFGSGPGAESGSVLGASKAAGAAARLGMTSDGRNKTGPGTLARKNPTKTRARTHSRTGEVDFREGYLEEESLKVQHRRKTVSQYRNFIFYFIIIFLRPESRSVAQAGVQWRDLGSLQTPPPGFTPFGCLTLHSSWDYKRPPPRPANLQYGNFNS

SEQ ID NO: 189 - protein, 317 aa, Homo sapiens
MGGVIKSIFTFVLIVEFIIGNLGNSFIALVNCIDWVKGRKISSVDRILTALAISRISLVWLIFGSWCVSVFFPALFATEKMFRMLTNIWTVINHFSVWLATGLGTFYFLKIANFSNSIFLYLKWRVKKVVLVLLLVTSVFLFLNIALINIHINASINGYRRNKTCSSDSSNFTRFSSLIVLTSTVFIFIPFTLSLAMFLLLIFSMWKHRKKMQHTVKISGDASTKAHRGVKSVITFFLLYAIFSLSFFISVWTSERLEENLIILSQVMGMAYPSCHSCVLILGNKKLRQASLSVLLWLRYMFKDGEPSGHKEFRESS

SEQ ID NO: 190 - protein, 299 aa, Homo sapiens
MMCFLLIISSILVVFAFVLGNVANGFIALVNVIDWVNTRKISSAEQILTALVVSRIGLLWVMLFLWYATVFNSALYGLEVRIVASNAWAVTNHFSMWLAASLSIFCLLKIANFSNLISLHLKKRIKSVVLVILLGPLVFLICNLAVITMDERVWTKEYEGNVTWKIKLRNAIHLSSLTVTTLANLIPFTLSLICFLLLICSLCKHLKKMRLHSKGSQDPSTKVHIKALQTVTSFLMLFAIYFLCIITSTWNLRTQQSKLVLLLCQTVAIMYPSFHSFILIMGSRKLKQTFLSVLWQMTC

SEQ ID NO: 191 - protein, 309 aa, Homo sapiens [sequence omitted]

SEQ ID NO: 192 - protein, 256 aa, Homo sapiens [sequence omitted]

SEQ ID NO: 193 - protein, 158 aa, Homo sapiens
ERVTIKGNLTFNYMDTMHDFTSLFLLQMMFILPFVETLASILLLILSLWSHTRQMKLHGIYSRDPSTEAHVKPIKAIISFLLLFIVHYFISIILTLACPLLDFVAARTFSSVLVFFHPSGHSFLLILRDSKLKQASLCVLKKMKYAKKDIISHFYKHA

SEQ ID NO: 194 - protein, 159 aa, Homo sapiens
PNCHCSGILQNWFTLIILLHWYATVFNSALYSLEVRIVPSNVSAIINHFSIWLATSLSIFYLFKIANFSNFIFLHLKKRIKSVLLVILLGSLVFLICNLAVVTMDDSVWTKEFEGNVTWKIELRNAIHLSNMTITNHASKLHTVHSDSNIFSAVSLFSV

SEQ ID NO: 195 - protein, 299 aa, Homo sapiens
MITFLYIFFSILIMVLFVLGNFANGFIALVNFIDWVKRKKISSADQILTALAVSRIGLLWALLLNWYLTVLNPAFYSVELRITSYNAWVVTNHFSMWLAANLSIFYLLKIANFSNLLFLHLKRRVRSVILVILLGTLIFLVCHLLVANMDESMWAEEYEGNMTGKMKLRNTVHLSYLTVTTLWSFIPFTLSLISFLMLICSLYKHLKKMQLHGEGSQDLSTKVHIKALQTLISFLLLCAIFFLFLIVSVWSPRRLRNDPVVMVSKAVGNIYLAFDSFILIWRTKKLKHTFLLILCQIRC

SEQ ID NO: 196 - protein, 309 aa, Homo sapiens [sequence omitted]

SEQ ID NO: 197 - protein, 71 aa, Homo sapiens
MICFLLIILSILVVFAFVLGNVANGFIALVGVLEWVKTQKISSADQISHCSGGVQNWFTLGHIITLVCNCV

SEQ ID NO: 198 - protein, 309 aa, Homo sapiens
MTTFIPIIFSSVVVVLFVIGNFANGFIALVNSIERVKRQKISFADQILTALAVSRVGLLWVLLLNWYSTVFNPAFYSVEVRTTAYNVWAVTGHFSNWLATSLSIFYLLKIANFSNLIFLHLKRRVKSVILVMLLGPLLFLACQLFVINMKEIVRTKEYEGNMTWKIKLRSAVYLSDATVTTLGNLVPFTLTLLCFLLLICSLCKHLKKMQLHGKGSQDPSTKVHIKALQTVIFFLLLCAVYFLSIMISVWSFGSLENKPVFMFCKAIRFSYPSIHPFILIWGNKKLKQTFLSVLRQVRYWVKGEKPSSP

SEQ ID NO: 199 - protein, 108 aa, Homo sapiens
MTPEELQKREEEEFNTGPLSVLTQSVKNNTQVLINCRNNKKLLGRVKAFDRHCNMVLENVKEMWTEVPKSGKGKKKSKPVNKDRYISKMFLRGDSVIVVLRNPLIAGK

SEQ ID NO: 200 - protein, 118 aa, Homo sapiens
MSLLNKPKSEMTPEELQKREEEEFNTGPLSVLTQSVKNNTQVLINCRNNKKLLGRVKAFDRHCNMVLENVKEMWTEVPKSGKGKKKSKPVNKDRYISKMFLRGDSVIVVLRNPLIAGK

SEQ ID NO: 201 - protein, 466 aa, Homo sapiens
MTTSPILQLLLRLSLCGLLLQRAETGSKGQTAGELYQRWERYRRECQETLAAAEPPSGLACNGSFDMYVCWDYAAPNATARASCPWYLPWHHHVAAGFVLRQCGSDGQWGLWRDHTQCENPEKNEAFLDQRLILERLQVMYTVGYSLSLATLLLALLILSLFRRLHCTRNYIHINLFTSFMLRAAAILSRDRLLPRPGPYLGDQALALWNQALAACRTAQIVTQYCVGANYTWLLVEGVYLHSLLVLVGGSEEGHFRYYLLLGWGAPALFVIPWVIVRYLYENTQCWERNEVKAIWWIIRTPILMTILINFLIFIRILGILLSKLRTRQMRCRDYRLRLARSTLTLVPLLGVHEVVFAPVTEEQARGALRFAKLGFEIFLSSFQGFLVSVLYCFINKEVQSEIRRGWHHCRLRRSLGEEQRQLPERAFRALPSGSGPGEVPTSRGLSSGTLPGPGNEASRELESYC

SEQ ID NO: 202 - protein, 419 aa, Homo sapiens
MTTSPILQLLLRLSLCGLLLQRAETGSKGQTAGELYQRWERYRRECQETLAAAEPPSGLACNGSFDMYVCWDYAAPNATARASCPWYLPWHHHVAAGFVLRQCGSDGQWGLWRDHTQCENPEKNEAFLDQRLILERLQVMYTVGYSLSLATLLLALLILSLFRRLHCTRNYIHINLFTSFMLRAAAILSRDRLLPRPGPYLGDQALALWNQALAACRTAQIVTQYCVGANYTWLLVEGVYLHSLLVLVGGSEEGHFRYYLLLGWGAPALFVIPWVIVRYLYENTQCWERNEVKAIWWIIRTPILMTILINFLIFIRILGILLSKLRTRQMRCRDYRLRLARSTLTLVPLLGVHEVVFAPVTEEQARGALRFAKLGFEIFLSSFQGFLVSVLYCFINKEVGRDPAAAPALWRQRGVRRRL

SEQ ID NO: 203 - protein, 563 aa, Homo sapiens
MLLPAPALRRALLSRPWTGAGLRWKHTSSLKVANEPVLAFTQGSPERDALQKALKDLKGRMEAIPCVVGDEEVWTSDVQYQVSPFNHGHKVAKFCYADKSLLNKAIEAALAARKEWDLKPIADRAQIFLKAADMLSGPRRAEILAKTMVGQGKTVIQAEIDAAAELIDFFRFNAKYAVELEGQQPISVPPSTNSTVYRGLEGFVAAISPFNFTAIGGNLAGAPALMGNVVLWKPSDTAMLASYAVYRILREAGLPPNIIQFVPADGPLFGDTVTSSEHLCGINFTGSVPTFKHLWKQVAQNLDRFHTFPRLAGECGGKNFHFVHRSADVESVVSGTLRSAFEYGGQKCSACSRLYVPHSLWPQIKGRLLEEHSRIKVGDPAEDFGTFFSAVIDAKSFARIKKWLEHARSSPSLTILAGGKCDDSVGYFVEPCIVESKDPQEPIMKEEIFGPVLSVYVYPDDKYKETLQLVDSTTSYGLTGAVFSQDKDVVQEATKVLRNAAGNFYINDKSTGSIVGQQPFGGARASGTNDKPGGPHYILRWTSPQVIKETHKPLGDWSYAYMQ

SEQ ID NO: 204 - protein, 563 aa, Homo sapiens; identical to SEQ ID NO: 203

SEQ ID NO: 205 - protein, 563 aa, Homo sapiens; identical to SEQ ID NO: 203

SEQ ID NO: 206 - protein, 517 aa, Homo sapiens
MVNSLLFGEMALAFGCPPGGGGGGCPGGGGGGGGAGPGPSPVTAALRDDLGSNIHLLKGLNVRFRCFLAKVHELERRNRLLEKQLEQQQSERERRLRYKTFSREQAVQTGPELLRPPAPGGGHGLSSGAAAGANANAVALGGLPPGGGSHPQHYGRLPGTIWSYTQVRRTGGGGVETVQGPGVSWVHPDGVGVQIDTITPEIRALYNVLAKVKRERDEYKRRWEEELAKRMNLQTMVDTLQEAAQEADAIQEEMNEKIERLKAELVVFKGLMSDPMTDLDTKIQEKAMKVDMDICRRIDITAKLCDVAQQRNSEDVSKIFQVVPKKKERKVASDDDISEQDGEVNRFSDDEVGSMNITDEMKRMFNQLRETFDFDDDCDSLTWEENEDTLLLWEDFTNCNPTIDLQGEQEENLGNLIHETESFFKTRDKEYQETIGQIELELATAKSDMNRHLHEYMEMCSMKRGLDVQMETCRRLIKGSADRNSPSPSSVASSDSGSTDEIQDEFEREADVEPMVS

SEQ ID NO: 207 - protein, 287 aa, Homo sapiens
MNLQTMVDTLQEAAQEADAIQEEMNEKIERLKAELVVFKGLMSDPMTDLDTKIQEKAMKVDMDICRRIDITAKLCDVAQQRNSEDVSKIFQVVPKKKERKVASDDDISEQDGEVNRFSDDEVGSMNITDEMKRMFNQLRETFDFDDDCDSLTWEENEDTLLLWEDFTNCNPTIDLQGEQEENLGNLIHETESFFKTRDKEYQETIGQIELELATAKSDMNRHLHEYMEMCSMKRGLDVQMETCRRLIKGSADRNSPSPSSVASSDSGSTDEIQDEFEREADVEPMVS

SEQ ID NO: 208 - protein, 446 aa, Homo sapiens [sequence omitted]

SEQ ID NO: 209 - protein, 470 aa, Homo sapiens [sequence omitted]

SEQ ID NO: 210 - protein, 318 aa, Homo sapiens
MFNSGEDGKPLLTTVKGGTGNGLEIMLDIQQDEYLPIWGETEETTFEAGVKVQIHSQSEPPFIQELGFGVAPGFQTFVATQEQRLTYLPPPWGECRSSEMGLDFFPVYSITACRIDCETRYIVENCNCRMVHMPGDAPFCTPEQHKECAEPALGLLAEKDSNYCLCRTPCNLTRYNKELSMVKIPSKTSAKYLEKKFNKSEKYISENILVLDIFFEALNYETIEQKKAYEVAALLGDIGGQMGLFIGASILTILELFDYIYELIKEKLLDLLGKEEDEGSHDENVSTCDTMPNHSETISHTVNVPLQTTLGTLEEIAC

SEQ ID NO: 211 - protein, 318 aa, Homo sapiens; identical to SEQ ID NO: 210

SEQ ID NO: 212 - protein, 165 aa, Homo sapiens
MEPTRDCPLFGGAFSAILPMGAIDVSDLRPVPDNQEVFCHPVTDQSLIVELLELQAHVRGEAAARYHFEDVGGVQGARAVHVESVQPLSLENLALRGRCQEAWVLSGKQQIAKENQQVRARECVMSWKGGSGDAEIQVSILTLIPLGSKGRDTSSGLAEAAPVPD

SEQ ID NO: 213 - protein, 165 aa, Homo sapiens; identical to SEQ ID NO: 212

SEQ ID NO: 214 - protein, 186 aa, Homo sapiens [sequence omitted]

SEQ ID NO: 215 - protein, 300 aa, Homo sapiens
MDFLMSGLAACGACVFTNPLEVVKTRMQLQGELQAPGTYQRHYRNVFHAFITIGKVDGLAALQKGLAPALLYQFLMNGIRLGTYGLAEAGGYLHTAEGTHSPARSAAAGAMAGVMGAYLGSPIYMVKTHLQAQAASEIAVGHQYKHQGMFQALTEIGQKHGLVGLWRGALGGLPRVIVGSSTQLCTFSSTKDLLSQWEIFPPQSWKLALVAAMMSGIAVVLAMAPFDVACTRLYNQPTDAQGKGLMYRGILDALLQTARTEGIFGMYKGIGASYFRLGPHTILSLFFWDQLRSLYYTDTK

SEQ ID NO: 216 - protein, 308 aa, Homo sapiens
MPGQELRTVNGSQMLLVLLVLSWLPHGGALSLAEASRASFPGPSELHSEDSRFRELRKRYEDLLTRLRANQSWEDSNTDLVPAPAVRILTPEVRLGSGGHLHLRISRAALPEGLPEASRLHRALFRLSPTASRSWDVTRPLRRQLSLARPQAPALHLRLSPPPSQSDQLLAESSSARPQLELHLRPQAARGRRRARARNGDHCPLGPGRCCRLHTVRASLEDLGWADWVLSPREVQVTMCIGACPSQFRAANMHAQIKTSLHRLKPDTVPAPCCVPASYNPMVLIQKTDTGVSLQTYDDLLAKDCHCI

SEQ ID NO: 217 - protein, 301 aa, Homo sapiens [sequence omitted]

SEQ ID NO: 218 - protein, 264 aa, Homo sapiens [sequence omitted]

SEQ ID NO: 219 - protein, 213 aa, Homo sapiens
MCIVGRLPWVKLPIYILVQLLSAFCASGATYVLYHDALQNYTGGNLTVTGPKETASIFATYPAPYLSLNNGFLDQVLGTGMLIVGLLAILDRRNKGVPAGLEPVVVGMLILALGLSMGANCGIPLNPARDLGPRLFTYVAGWGPEVFSAGNGWWWVPVVAPLVGATVGTATYQLLVALHHPEGPEPAQDLVSAQHKASELETPASAQMLECKL

SEQ ID NO: 220 - protein, 1155 aa, Homo sapiens
MAVCAKKRPPEEERRARANDREYNEKFQYASNCIKTSKYNILTFLPVNLFEQFQEVANTYFLFLLILQLIPQISSLSWFTTIVPLVLVLTITAVKDATDDYFRHKSDNQVNNRQSQVLINGILQQEQWMNVCVGDIIKLENNQFVAAVDWTLSSGILVSCSGEVICEPPNNKLDKFSGTLYWKENKFPLSNQNMLLRGCVLRNTEWCFGLVIFAGPDTKLMQNSGRTKFKRTSIDRLMNTLVLWIFGFLVCMGVILAIGNAIWEHEVGMRFQVYLPWDEAVDSAFFSGFLSFWSYIIILNTVVPISLYVSVEVIRLGHSYFINWDKKMFCMKKRTPAEARTTTLNEELGQVEYIFSDKTGTLTQNIMVFNKCSINGHSYGDVFDVLGHKAELGERPEPVDFSFNPLADKKFLFWDPSLLEAVKIGDPHTHEFFRLLSLCHTVMSEEKNEGELYYKAQSPDEGALVTAARNFGFVFRSRTPKTITVHEMGTAITYQLLAILDFNNIRKRMSVIVRNPEGKIRLYCKGADTILLDRLHHSTQELLNTTMDHLNEYAGEGLRTLVLAYKDLDEEYYEEWAERRLQASLAQDSREDRLASIYEEVENNMMLLGATAIEDKLQQGVPETIALLTLANIKIWVLTGDKQETAVNIGYSCKMLTDDMTEVFIVTGHTVLEVREELRKAREKMMDSSRSVGNGFTYQDKLSSSKLTSVLEAVAGEYALVINGHSLAHALEADMELEFLETACACKAVICCRVTPLQKAQVVELVKKYKKAVTLAIGDGANDVSMIKTAHIGVGISGQEGIQAVLASDYSFSQFKFLQRLLLVHGRWSYLRMCKFLCYFFYKNFAFTMVHFWFGFFCGFSAQTVYDQYFITLYNIVYTSLPVLAMGVFDQDVPEQRSMEYPKLYEPGQLNLLFNKREFFICIAQGIYTSVLMFFIPYGVFADATRDDGTQLADYQSFAVTVATSLVIVVSVQIGLDTGYWTAINHFFIWGSLAVYFAILFAMHSNGLFDMFPNQFRFVGNAQNTLAQPTVWLTIVLTTVVCIMPVVAFRFLRLNLKPDLSDTVRYTQLVRKKQKAQHRCMRRVGRTGSRRSGYAFSHQEGFGELIMSGKNMRLSSLALSSFTTRSSSSWIESLRRKKSDSASSPSGGADKPLKG

SEQ ID NO: 221 - protein, 381 aa, Homo sapiens
MTVPKEMPEKWARAQAPPSWSRKKPSWGTEEERRARANDREYNEKFQYASNCIKTSKYNILTFLPVNLFEQFQEVANTYFLFLLILQLIPQISSLSWFTTIVPLVLVLTITAVKDATDDYFRHKSDNQVNNRQSQVLINGILQQEQWMNVCVGDIIKLENNQFVAADLLLLSSSEPHGLCYIETAELDGETNMKVRQAIPVTSELGDISKLAKFDGEVICEPPNNKLDKFSGTLYWKENKFPLSNQNMLLRGCVLRNTEWCFGLVIFAGPDTKLMQNSGRTKFKRTSIDRLMNTLVLWIFGFLVCMGVILAIGNAIWEHEVGMRFQVYLPWDEAVDSAFFSGFLSFWSYIIILNTVVPISLYVSPECGGHPSGPQLLHQLG

SEQ ID NO: 222 - protein, 1164 aa, Homo sapiens
MAVCAKKRPPEEERRARANDREYNEKFQYASNCIKTSKYNILTFLPVNLFEQFQEVANTYFLFLLILQLIPQISSLSWFTTIVPLVLVLTITAVKDATDDYFRHKSDNQVNNRQSQVLINGILQQEQWMNVCVGDIIKLENNQFVAAVDWTLSSGILVSCSGEVICEPPNNKLDKFSGTLYWKENKFPLSNQNMLLRGCVLRNTEWCFGLVIFAGPDTKLMQNSGRTKFKRTSIDRLMNTLVLWIFGFLVCMGVILAIGNAIWEHEVGMRFQVYLPWDEAVDSAFFSGFLSFWSYIIILNTVVPISLYVSVEVIRLGHSYFINWDKKMFCMKKRTPAEARTTTLNEELGQVEYIFSDKTGTLTQNIMVFNKCSINGHSYGDVFDVLGHKAELGERPEPVDFSFNPLADKKFLFWDPSLLEAVKIGDPHTHEFFRLLSLCHTVMSEEKNEGELYYKAQSPDEGALVTAARNFGFVFRSRTPKTITVHEMGTAITYQLLAILDFNNIRKRMSVIVRNPEGKIRLYCKGADTILLDRLHHSTQELLNTTMDHLNVGEYAGEGLRTLVLAYKDLDEEYYEEWAERRLQASLAQDSREDRLASIYEEVENNMMESLWYFQLLGATAIEDKLQQGVPETIALLTLANIKIWVLTGDKQETAVNIGYSCKMLTDDMTEVFIVTGHTVLEVREELRKAREKMMDSSRSVGNGFTYQDKLSSSKLTSVLEAVAGEYALVINGHSLAHALEADMELEFLETACACKAVICCRVTPLQKAQVVELVKKYKKAVTLAIGDGANDVSMIKTAHIGVGISGQEGIQAVLASDYSFSQFKFLQRLLLVHGRWSYLRMCKFLCYFFYKNFAFTMVHFWFGFFCGFSAQTVYDQYFITLYNIVYTSLPVLAMGVFDQDVPEQRSMEYPKLYEPGQLNLLFNKREFFICIAQGIYTSVLMFFIPYGVFADATRDDGTQLADYQSFAVTVATSLVIVVSVQIGLDTGYWTAINHFFIWGSLAVYFAILFAMHSNGLFDMFPNQFRFVGNAQNTLAQPTVWLTIVLTTVVCIMPVVAFRFLRLNLKPDLSDTVRYTQLVRKKQKAQHRCMRRVGRTGSRRSGYAFSHQEGFGELIMSGKNMRLSSLALSSFTTRSSSSWIESLRRKKSDSASSPSGGADKPLKG

SEQ ID NO: 223 - protein, 634 aa, Homo sapiens
MAQGVLWILLGLLLWSDPGTASLPLLMDSVIQALAELEQKVPAAKTRHTASAWLMSAPNSGPHNRLYHFLLGAWSLNATELDPCPLSPELLGLTKEVARHDVREGKEYGVVLAPDGSTVAVEPLLAGLEAGLQGRRVINLPLDSMAAPWETGDTFPDVVAIAPDVRATSSPGLRDGSPDVTTADIGANTPDATKGCPDVQASLPDAKAKSPPTMVDSLLAVTLAGNLGLTFLRGSQTQSHPDLGTEGCWDQLSAPRTFTLLDPKASLLTMAFLNGALDGVILGDYLSRTPEPRPSLSHLLSQYYGAGVARDPGFRSNFRRQNGAALTSASILAQQVWGTLVLLQRLEPVHLQLQCMSQEQLAQVAANATKEFTEAFLGCPAIHPRCRWGAAPYRGRPKLLQLPLGFLYVHHTYVPAPPCTDFTRCAANMRSMQRYHQDTQGWGDIGYSFVVGSDGYVYEGRGWHWVGAHTLGHNSRGFGVAIVGNYTAALPTEAALRTVRDTLPSCAVRAGLLRPDYALLGHRQLVRTDCPGDALFDLLRTWPHFTAVSLRSLHYTARRPSVYTSSTRPLPPACNSCARTASARPPTSRRHVYSGNLGPAFAGHSAGNIPDPVTSAYAASAQPQTQPACPFPSS

SEQ ID NO: 224 - protein, 576 aa, Homo sapiens
MAQGVLWILLGLLLWSDPGTASLPLLMDSVIQALAELEQKVPAAKTRHTASAWLMSAPNSGPHNRLYHFLLGAWSLNATELDPCPLSPELLGLTKEVARHDVREGKEYGVVLAPDGSTVAVEPLLAGLEAGLQGRRVINLPLDSMAAPWETGDTFPDVVAIAPDVRATSSPGLRDGSPDVTTADIGANTPDATKGCPDVQASLPDAKAKSPPTMVDSLLAVTLAGNLGLTFLRGSQTQSHPDLGTEGCWDQLSAPRTFTLLDPKASLLTMAFLNGALDGVILGDYLSRTPEPRPSLSHLLSQYYGAGVARDPGFRSNFRRQNGAALTSASILAQQVWGTLVLLQRLEPVHLQLQCMSQEQLAQVAANATKEFTEAFLGCPAIHPRCRWGAAPYRGRPKLLQLPLGFLYVHHTYVPAPPCTDFTRCAANMRSMQRYHQDTQGWGDIGYSFVVGSDGYVYEGRGWHWVGAHTLGHNSRGFGVAIVGNYTAALPTEAALRTVRDTLPSCAVRAGLLRPDYALLGHRQLVRTDCPGDALFDLLRTWPHFTATVKPRPARSVSKRSRREPPPRTLPATDLQ

SEQ ID NO: 225 - protein, 132 aa, Homo sapiens
MAFDSTWKVDRSENYDKFMEKMGVNIVKRKLAAHDNLKLTITQEGNKFTVKESSAFRNIEVVFELGVTFNYNLADGTELRGTWSLEGNKLIGKFKRTDNGNELNTVREIIGDELVQTYVYEGVEAKRIFKKD

SEQ ID NO: 226 - protein, 293 aa, Homo sapiens
MRLPSPELELSKLRTSAIRTAPNPYYCQVGLGPAQSWPLPPGVTEVSPANVTLLRALGHGAFGEVYEGLVIGLPGDSSPLQVAIKTLPELCSPQDELDFLMEALIISKFRHQNIVRCVGLSLRATPRLILLELMSGGDMKSFLRHSRPHLGQPSPLVMRDLLQLAQDIAQGCHYLEENHFIHRDIAARNCLLSCAGPSRVAKIGDFGMARDIYRASYYRRGDRALLPVKWMPPEAFLEGIFTSKTDSWSFGVLLWEIFSLGYMPYPGRTNQEVLDFVVGGGRMDPPRGCPGPV

SEQ ID NO: 227 - protein, 803 aa, Homo sapiens
MGCWGQLLVWFGAAGAILCSSPGSQETFLRSSPLPLASPSPRDPKVSAPPSILEPASPLNSPGTEGSWLFSTCGASGRHGPTQTQCDGAYAGTSVVVTVGAAGQLRGVQLWRVPGPGQYLISAYGAAGGKGAKNHLSRAHGVFVSAIFSLGLGESLYILVGQQGEDACPGGSPESQLVCLGESRAVEEHAAMDGSEGVPGSRRWAGGGGGGGGATYVFRVRAGELEPLLVAAGGGGRAYLRPRDRGRTQASPEKLENRSEAPGSGGRGGAAGGDASETDNLWADGEDGVSFIHPSSELFLQPLAVTENHGEVEIRRHLNCSHCPLRDCQWQAELQLAECLCPEGMELAVDNVTCMDLHKPPGPLVLMVAVVATSTLSLLMVCGVLILVKQKKWQGLQEMRLPSPELELSKLRTSAIRTAPNPYYCQVGLGPAQSWPLPPGVTEVSPANVTLLRALGHGAFGEVYEGLVIGLPGDSSPLQVAIKTLPELCSPQDELDFLMEALIISKFRHQNIVRCVGLSLRATPRLILLELMSGGDMKSFLRHSRPHLGQPSPLVMRDLLQLAQDIAQGCHYLEENHFIHRDIAARNCLLSCAGPSRVAKIGDFGMARDIYRASYYRRGDRALLPVKWMPPEAFLEGIFTSKTDSWSFGVLLWEIFSLGYMPYPGRTNQEVLDFVVGGGRMDPPRGCPGPVYRIMTQCWQHEPELRPSFASILERLQYCTQDPDVLNSLLPMELGPTPEEEGTSGLGNRSLECLRPPQPQELSPEKLKSWGGSPLGPWLSSGLKPLKSRGLQPQNLWNPTYRS

SEQ ID NO: 228 - protein, 485 aa, Homo sapiens
MGCWGQLLVWFGAAGAILCSSPGSQETFLRSSPLPLASPSPRDPKVSAPPSILEPASPLNSPGTEGSWLFSTCGASGRHGPTQTQCDGAYAGTSVVVTVGAAGQLRGVQLWRVPGPGQYLISAYGAAGGKGAKNHLSRAHGVFVSAIFSLGLGESLYILVGQQGEDACPGGSPESQLVCLGESRAVEEHAAMDGSEGVPGPPGREPSPSGSAPGQLEGASWNTPLAPQVRAGELEPLLVAAGGGGRAYLRPRDRGRTQASPEKLENRSEAPGSGGRGGAAGGGGGWTSRAPSPQAGRSLQEGAEGGQGCSEAWATLGWAAAGGFGGGGGACTAGGGGGGYRGGDASETDNLWADGEDGVSFIHPSSELFLQPLAVTENHGEVEIRRHLNCSHCPLRDCQWQAELQLAECLCPEGMELAVDNVTCMDLHKPPGPLVLMVAVVATSTLSLLMVCGVLILGTKRLAGTVDSRLLLSSELGWVSAGSRG

SEQ ID NO: 229 - protein, 475 aa, Homo sapiens
MELAVDNVTCMDLHKPPGPLVLMVAVVATSTLSLLMVCGVLILGTKRLAGTVDSRLLLSMKQKKWQGLQEMRLPSPELELSKLRTSAIRTAPNPYYCQVGLGPAQSWPLPPGVTEVSPANVTLLRALGHGAFGEVYEGLVIGLPGDSSPLQVAIKTLPELCSPQDELDFLMEALIISKFRHQNIVRCVGLSLRATPRLILLELMSGGDMKSFLRHSRPHLGQPSPLVMRDLLQLAQDIAQGCHYLEENHFIHRDIAARNCLLSCAGPSRVAKIGDFGMARDIYRASYYRRGDRALLPVKWMPPEAFLEGIFTSKTDSWSFGVLLWEIFSLGYMPYPGRTNQEVLDFVVGGGRMDPPRGCPGPVYRIMTQCWQHEPELRPSFASILERLQYCTQDPDVLNSLLPMELGPTPEEEGTSGLGNRSLECLRPPQPQELSPEKLKSWGGSPLGPWLSSGLKPLKSRGLQPQNLWNPTYRS

SEQ ID NO: 230 - protein, 221 aa, Homo sapiens
MGCWGQLLVWFGAAGAILCSSPGSQETFLRSSPLPLASPSPRDPKVSAPPSILEPASPLNSPGTEGSWLFSTCGASGRHGPTQTQCDGAYAGTSVVVTVGAAGQLRGVQLWRVPGPGQYLISAYGAAGGKGAKNHLSRAHGVFVSAIFSLGLGESLYILVGQQGEDACPGVSAASGDGAAPAPGARAAWGPGERAFLGAGSPAQRGEAPGPRRFPPPLPAG

SEQ ID NO: 231 - protein, 475 aa, Homo sapiens; identical to SEQ ID NO: 229

SEQ ID NO: 232 - protein, 864 aa, Homo sapiens
MGCWGQLLVWFGAAGAILCSSPGSQETFLRSSPLPLASPSPRDPKVSAPPSILEPASPLNSPGTEGSWLFSTCGASGRHGPTQTQCDGAYAGTSVVVTVGAAGQLRGVQLWRVPGPGQYLISAYGAAGGKGAKNHLSRAHGVFVSAIFSLGLGESLYILVGQQGEDACPGGSPESQLVCLGESRAVEEHAAMDGSEGVPGSRRWAGGGGGGGGATYVFRVRAGELEPLLVAAGGGGRAYLRPRDRGRTQASPEKLENRSEAPGSGGRGGAAGGGGGWTSRAPSPQAGRSLQEGAEGGQGCSEAWATLGWAAAGGFGGGGGACTAGGGGGGYRGGDASETDNLWADGEDGVSFIHPSSELFLQPLAVTENHGEVEIRRHLNCSHCPLRDCQWQAELQLAECLCPEGMELAVDNVTCMDLHKPPGPLVLMVAVVATSTLSLLMVCGVLILVKQKKWQGLQEMRLPSPELELSKLRTSAIRTAPNPYYCQVGLGPAQSWPLPPGVTEVSPANVTLLRALGHGAFGEVYEGLVIGLPGDSSPLQVAIKTLPELCSPQDELDFLMEALIISKFRHQNIVRCVGLSLRATPRLILLELMSGGDMKSFLRHSRPHLGQPSPLVMRDLLQLAQDIAQGCHYLEENHFIHRDIAARNCLLSCAGPSRVAKIGDFGMARDIYRASYYRRGDRALLPVKWMPPEAFLEGIFTSKTDSWSFGVLLWEIFSLGYMPYPGRTNQEVLDFVVGGGRMDPPRGCPGPVYRIMTQCWQHEPELRPSFASILERLQYCTQDPDVLNSLLPMELGPTPEEEGTSGLGNRSLECLRPPQPQELSPEKLKSWGGSPLGPWLSSGLKPLKSRGLQPQNLWNPTYRS

SEQ ID NO: 233 - protein, 607 aa, Homo sapiens
MWRAVGPVPVACLLFLGAYYQAWSQQPSSCPEDWLQDMERLSEELLLPLLSQPTLGSLWDSLRHCSLLCNPLSCVPALEAPPSLVSLGCSGGCPRLSLAGSASPFPFLTALLSLLNTLAQIHKGLCGQLAAILAAPGLQNYFLQCVAPGAAPHLTPFSAWALRHEYHLQYLALALAQKAAALQPLPATHAALYHGMALALLSRLLPGSEYLTHELLLSCVFRLEFLPERTSGGPEAADFSDQLSLGSSRVPRCGQGTLLAQACQDLPSIRNCYLTHCSPARASLLASQALHRGELQRVPTLLLPMPTEPLLPTDWPFLPLIRLYHRASDTPSGLSPTDTMGTAMRVLQWVLVLESWRPQALWAVPPAARLARLMCVFLVDSELFRESPVQHLVAALLAQLCQPQVLPNLNLDCRLPGLTSFPDLYANFLDHFEAVSFGDHLFGALVLLPLQRRFSVTLRLALFGEHVGALRALSLPLTQLPVSLECYTVPPEDNLALLQLYFRTLVTGALRPRWCPVLYAVAVAHVNSFIFSQDPQSSDEVKAARRSMLQKTWLLADEGLRQHLLHYKLPNSTLPEGFELYSQLPPLRQHYLQRLTSTVLQNGVSET

SEQ ID NO: 234 - protein, 1393 aa, Homo sapiens [sequence omitted]

SEQ ID NO: 235 - protein, 553 aa, Homo sapiens
MWRAVGPVPVACLLFLGAYYQAWSQQPSSCPEDWLQDMERLSEELLLPLLSQPTLGSLWDSLRHCSLLCNPLSCVPALEAPPSLVSLGCSGGCPRLSLAGSASPFPFLTALLSLLNTLAQIHKGLCGQLAAILAAPGLQNYFLQCVAPGAAPHLTPFSAWALRHEYHLQYLALALAQKAAALQPLPATHAALYHGMALALLSRLLPGSEYLTHELLLSCVFRLEFLPERTSGGPEAADFSDQLSLGSSRVPRCGQGTLLAQACQDLPSIRNCYLTHCSPARASLLASQALHRGELQRVPTLLLPMPTEPLLPTDWPFLPLIRLYHRASDTPSGLSPTDTMGTAMRVLQWVLVLESWRPQALWAVPPAARLARLMCVFLVDSELFRESPVQHLVAALLAQLCQPQVLPNLNLDCRLPGLTSFPDLYANFLDHFEAVSFGDHLFGALVLLPLQRRFSVTLRLALFGEHVGALRALSLPLTQLPVSLECYTVPPEDNLALLQLYFRTLVTGALRPRWCPVLYAVAVAHVNSFIFSQDPQSSVSYISIFRGRKGASN

SEQ ID NO: 236 - protein, 1315 aa, Homo sapiens [sequence omitted]

SEQ ID NO: 237 - protein, 443 aa, Homo sapiens
MCPQLAGAGSMGSPGATTGWGLLDYKTEKYVMTRNWRVGALQRLLQFGIVVYVVGWALLAKKGYQERDLEPQFSIITKLKGVSVTQIKELGNRLWDVADFVKPPQGENVFFLVTNFLVTPAQVQGRCPEHPSVPLANCWVDEDCPEGEGGTHSHGVKTGQCVVFNGTHRTCEIWSWCPVESGVVPSRPLLAQAQNFTLFIKNTVTFSKFNFSKSNALETWDPTYFKHCRYEPQFSPYCPVFRIGDLVAKAGGTFEDLALLGGSVGIRVHWDCDLDTGDSGCWPHYSFQLQEKSYNFRTATHWWEQPGVEARTLLKLYGIRFDILVTGQVGTGKFGLIPTAVTLGTGAAWLGVVTFFCDLLLLYVDREAHFYWRTKYEEAKAPKATANSVWRELALASQARLAECLRRSSAPAPTATAAGSQTQTPGWPCPSSDTHLPTHSGSL

SEQ ID NO: 238 - protein, 441 aa, Homo sapiens
MCPQLAGAGSMGSPGATTGWGLLDYKTEKYVMTRNWRVGALQRLLQFGIVVYVVGWALLAKKGYQERDLEPQFSIITKLKGVSVTQIKELGNRLWDVADFVKPPQGENVFFLVTNFLVTPAQVQGRCPEHPSVPLANCWVDEDCPEGEGGTHSHGVKTGQCVVFNGTHRTCEIWSWCPVESGVVPSRPLLAQAQNFTLFIKNTVTFSKFNFSKSNALETWDPTYFKHCRYEPQFSPYCPVFRIGDLVAKAGGTFEDLALLGGSVGIRVHWDCDLDTGDSGCWPHYSFQLQEKSYNFRTATHWWEQPGVEARTLLKLYGIRFDILVTGQAGKFGLIPTAVTLGTGAAWLGVVTFFCDLLLLYVDREAHFYWRTKYEEAKAPKATANSVWRELALASQARLAECLRRSSAPAPTATAAGSQTQTPGWPCPSSDTHLPTHSGSL

SEQ ID NO: 239 - protein, 635 aa, Homo sapiens
MARGLPTIASLARLCQKLNRLKPLEDSTMETSLRRCLSTLDLTLLGVGGMVGSGLYVLTGAVAKEVAGPAVLLSFGVAAVASLLAALCYAEFGARVPRTGSAYLFTYVSMGELWAFLIGWNVLLEYIIGGAAVARAWSGYLDSMFSHSIRNFTETHVGSWQVPLLGHYPDFLAAGIILLASAFVSCGARVSSWLNHTFSAISLLVILFIVILGFILAQPHNWSADEGGFAPFGFSGVMAGTASCFYAFVGFDVIAASSEEAQNPRRSVPLAIAISLAIAAGAYILVSTVLTLMVPWHSLDPDSALADAFYQRGYRWAGFIVAAGSICAMNTVLLSLLFSLPRIVYAMAADGLFFQVFAHVHPRTQVPVAGTLAFGLLTAFLALLLDLESLVQFLSLGTLLAYTFVATSIIVLRFQKSSPPSSPGPASPGPLTKQQSSFSDHLQLVGTVHASVPEPGELKPALRPYLGFLDGYSPGAVVTWALGVMLASAITIGCVLVFGNSTLHLPHWGYILLLLLTSVMFLLSLLVLGAHQQQYREDLFQIPMVPLIPALSIVLNICLMLKLSYLTWVRFSIWLLMGLAVYFGYGIRHSKENQRELPGLNSTHYVVFPRGSLEETVQAMQPPSQAPAQDPGHME

SEQ ID NO: 240 - protein, 466 aa, Homo sapiens
MEPELLVRKVSALQACVRGFLVRRQFQSLRAEYEAIVREVEGDLGTLQWTEGRIPRPRFLPEKAKSHQTWKAGDRVANPEQGLWNHFPCEESEGEATWEEMVLKKSGESSANQGSLCRDHSSWLQMKQNRKPSQEKTRDTTRMENPEATDQRLPHSQPQLQELQYHRSHLAMELLWLQQAINSRKEYLLLKQTLRSPEAGPIREEPRVFLEHGEQACERDQSQPSAPLEDQSYRDRTTGELEQEDDSCHRVKSPHRSPGSLATTQKNIAGAKCREPCYSKSGPPSSIPSNSQALGDRLTKGPDDGRQTFGGTCLLQMKILEDQTPRGLKPRNHCPRKSRTQLSALYEDSNIKEMSPRKLDHKEPDCRTVRTQELGLSEDHIIWDGTLGGPEHSVLDLWRTKPPKGQAPTDRSSRDGTSNEPSHEGQKKQRTIPWRSKSPEILSSTKAGCTGEEQWRGRPWKTEPPG

SEQ ID NO: 241 - protein, 146 aa, Homo sapiens
MVITIYYDVKVRFIVRGCGQYISYRCQEKRNTYFAEYWYQAQCCQYDYCNSWSSPQLQSSLPEPHDRPLALPLSDSQIQWFYQALNLSLPLPNFHAGTEPDGLDPMVTLSLNLGLSFAELRRMYLFLNSSGLLVLPQAGLLTPHPS

SEQ ID NO: 242 - protein, 146 aa, Homo sapiens; identical to SEQ ID NO: 241

SEQ ID NO: 243 - protein, 356 aa, Homo sapiens
MSRPLLITFTPATDPSDLWKDGQQQPQPEKPESTLDGAAARAFYEALIGDESSAPDSQRSQTEPARERKRKKRRIMKAPAAEAVAEGASGRHGQGRSLEAEDKMTHRILRAAQEGDLPELRRLLEPHEAGGAGGNINARDAFWWTPLMCAARAGQGAAVSYLLGRGAAWVGVCELSGRDAAQLAEEAGFPEVARMVRESHGETRSPENRSPTPSLQYCENCDTHFQDSNHRTSTAHLLSLSQGPQPPNLPLGVPISSPGFKLLLRGGWEPGMGLGPRGEGRANPIPTVLKRDQEGLGYRSAPQPRVTHFPAWDTRAVAGRERPPRVATLSWREERRREEKDRAWERDLRTYMNLEF

SEQ ID NO: 244 - protein, 356 aa, Homo sapiens; identical to SEQ ID NO: 243

SEQ ID NO: 245 - protein, 356 aa, Homo sapiens; identical to SEQ ID NO: 243

SEQ ID NO: 246 - protein, 356 aa, Homo sapiens; identical to SEQ ID NO: 243

SEQ ID NO: 247 - protein, 234 aa, Homo sapiens
MEKCKGTSRMAGTTSADVKMSSSEEVSWISWFCGLRGNEFFCEVDEDYIQDKFNLTGLNEQVPHYRQALDMILDLEPDEELEDNPNQSDLIEQAAEMLYGLIHARYILTNRGIAQMLEKYQQGDFGYCPRVYCENQPMLPIGLSDIPGEAMVKLYCPKCMDVYTPKSSRHHHTDGAYFGTGFPHMLFMVHPEYRPKRPANQFVPRLYGFKIHPMAYQLQLQAASNFKSPVKTIR

SEQ ID NO: 248 - protein, 215 aa, Homo sapiens
MSSSEEVSWISWFCGLRGNEFFCEVDEDYIQDKFNLTGLNEQVPHYRQALDMILDLEPDEELEDNPNQSDLIEQAAEMLYGLIHARYILTNRGIAQMLEKYQQGDFGYCPRVYCENQPMLPIGLSDIPGEAMVKLYCPKCMDVYTPKSSRHHHTDGAYFGTGFPHMLFMVHPEYRPKRPANQFVPRLYGFKIHPMAYQLQLQAASNFKSPVKTIR

SEQ ID NO: 249 - protein, 110 aa, Homo sapiens [sequence omitted]

SEQ ID NO: 250 - protein, 125 aa, Homo sapiens [sequence omitted]

SEQ ID NO: 251 - protein, 139 aa, Homo sapiens
AAAEHRRGRKKDEVREGAGFLEPQGSTELSKFVPVNWEPPQPLPFPKYLRCYRCLLETKELGCLLGSDICLTPAGSSCITLHKKNSSGSDVMVSDCRSKEQMSDCSNTRTSPVSGFWIFSQYCFLDFCNDPQNRGLYTP

SEQ ID NO: 252 - protein, 148 aa, Homo sapiens
MQTFPVAGALDPAILDTSSPQALYTVLLIVLVMMSLVFGKFVPVNWEPPQPLPFPKYLRCYRCLLETKELGCLLGSDICLTPAGSSCITLHKKNSSGSDVMVSDCRSKEQMSDCSNTRTSPVSGFWIFSQYCFLDFCNDPQNRGLYTP

SEQ ID NO: 253 - DNA, 201 bp, Homo sapiens
tgctgcacgagctggcgctcagcgtgccgggcgcccggagcaaggtaacaaataaggatgcaactaaaatcagcaccgtacgcgtccagggcaatgacatytcacaccggcttcggctgtctgccgtgcggctgcaggacgagggcgtgtacgagtgccgcgtgtcggactacagcgacgacgacacgcaggagcacaagg

SEQ ID NO: 254 - DNA, 158 bp, Homo sapiens
tcttggatgccacacaggagcccacaagactgtccctcaggctactggggaagggctgcatcaccagccagtgccccgagctcagctgctggcaccaggtmctgctgagcgccctgagaggcagcaagccagctgctttgctcggaaccacagcagcc

SEQ ID NO: 255 - DNA, 115 bp, Homo sapiens
actggggaagggctgcatcaccagccagtgccccgagctcagctgctggcaccaggtactgctgagcgccctgagaggcagcaagccagctgctttgctcrgaaccacagcagcc

SEQ ID NO: 256 - DNA, 201 bp, Homo sapiens; identical to SEQ ID NO: 253

SEQ ID NO: 257 - DNA, 201 bp, Homo sapiens
acagacccactcttgtccctgctcctgttagctctgcataagttcctgcgcctgctcttgggacattgacagacaagaccaacccgagcatctcagaggcygcacatgacctgcccggggccctcggtgaggaccatgtcgctggatggacacagagagactgagagacgcatgaaaaagtccacatggaaaataaataaa

SEQ ID NO: 258 - DNA, 170 bp, Homo sapiens
accgcctgcgccgcggcgagtgaggcgtcgtccgtactggaggctagctcttgtcgcggccgcggcgagwtaacatcgtttttccaatctgtccgcggctgccgccacccaagacagagccagaatgttcaggatgctgaacagcagttttgaggatgaccccttcttct

SEQ ID NO: 259 - DNA, 201 bp, Homo sapiens
tgatatctgaatgttcatgaaggtcctagctttatattgtccctcttttaggaataaaattttgattttcaacaatgtgagtaaattgagtctatttaatrtaaaactctttaaaacatactaattttttaaagcttatatgcttatttcgcttccccagttgtttttgtgttggctaaatattcttttatatttatcaag

SEQ ID NO: 260 - DNA, 173 bp, Homo sapiens
accgcctgcgccgcggcgagtgaggcgtcgtccgtactggaggctagctcttgtcgcggccgcggcgagttarcatcgtttttccaatctgtccgcggctgccgccacccaagacagagccagaatgttcaggatgctgaacagcagttttgaggatgaccccttcttctctg

SEQ ID NO: 261 - DNA, 201 bp, Homo sapiens
tcatgcttttgatgaggagtggcaaagtgaggttttgaagtacaaaccaggacgacacaatctaggaaacactagaatgagaagtgttggccatgagaatmctggctcccgagaacttaaaagaagggagaaacctcaacaaagtccagccattgaacatggaaggagatcaaatgttttgggggacaaactccacatcaa

SEQ ID NO: 262 - DNA, 201 bp, Homo sapiens
tgttttaattataccattaaaaatcagctttagctttttaattctagaatttaagcatcagtctgttcttataaaagttaggtttgaagtttataagaatrtaaaatcttaactcacatttgttgtttaatatttctgtcaaggaaaaaagcccccaaaaattgctatcactctataatcctaagtatttttcttttcaat

SEQ ID NO: 263 - DNA, 201 bp, Homo sapiens
cgtcgtccgtactggaggctagctcttgtcgcggccgcggcgagttaacatcgtttttccaatctgtccgcggctgccgccacccaagacagagccagaaygttcaggatgctgaacagcagttttgaggatgaccccttcttctctgagtccattcttgcacaccgagaaaatatgcgacagatgataagaagtttttct

SEQ ID NO: 264 - DNA, 201 bp, Homo sapiens
ctgatggtagagggagagctcataatcgtagaggacataatgatggtgaagattctttgactcatacagatgtcagctctttccagacaatggaccaaatrgtgtcaaatatgagaaactatatgcagaaattagaaagaaacttcggtcaactttcagtggatccaaatggacattcattttgttcttcctcagttatga

SEQ ID NO: 265 - DNA, 201 bp, Homo sapiens
agtatctctgatggtagagggagagctcataatcgtagaggacataatgatggtgaagattctttgactcatacagatgtcagctctttccagacaatggrccaaatggtgtcaaatatgagaaactatatgcagaaattagaaagaaacttcggtcaactttcagtggatccaaatggacattcattttgttcttcctca

SEQ ID NO: 266 - DNA, 201 bp, Homo sapiens
gtcatcatatccatgaccgagctcatgtcattaaaaagtcaaagaacaagaagactggagatgaagaggtcaaccaggagttcatcaatatgaatgaaagygatgctcatgcttttgatgaggagtggcaaagtgaggttttgaagtacaaaccaggacgacacaatctaggaaacactagaatgagaagtgttggccatg

SEQ ID NO: 267 - DNA, 201 bp, Homo sapiens
attttcagagaaaaatattttaaattgctaatgtacatgattgttttggttataatttatttatagaatgtatcttttctatattacattcttaatattcrccagatattatattgaccattctctttaacttcttaatgtggcatatttctactctcctttcccacaaacagcttcatctgtctccaaggttaacattct

SEQ ID NO: 268 - DNA, 201 bp, Homo sapiens
ataatttatttatagaatgtatcttttctatattacattcttaatattcaccagatattatattgaccattctctttaacttcttaatgtggcatatttcwactctcctttcccacaaacagcttcatctgtctccaaggttaacattctgaagctggagagtccttggagaaactctgctcagcttttttgtgacattta

SEQ ID NO: 269 - DNA, 201 bp, Homo sapiens; identical to SEQ ID NO: 259

SEQ ID NO: 270 - DNA, 201 bp, Homo sapiens; identical to SEQ ID NO: 261

SEQ ID NO: 271 - DNA, 201 bp, Homo sapiens; identical to SEQ ID NO: 262

SEQ ID NO: 272 - DNA, 153 bp, Homo sapiens
catcgtttttccaatctgtccgcggctgccgccacccaagacagagccagaaygttcaggatgctgaacagcagttttgaggatgaccccttcttcagtgagtccattcttgcacaccgagaaaatatgcgacagatgataagaagtttttct

SEQ ID NO: 273 - DNA, 201 bp, Homo sapiens
gtgaagattctttgactgcaacgagttgttctcttgtgccttttggcgattttggtggtatgcatacagatgtcagctctttccagacaatggaccaaatrgtgtcaaatatgagaaactatatgcagaaattagaaagaaacttcggtcaactttcagtggatccaaatggacattcattttgttcttcctcagttatga

SEQ ID NO: 274 - DNA, 201 bp, Homo sapiens
aatgatggtgaagattctttgactgcaacgagttgttctcttgtgccttttggcgattttggtggtatgcatacagatgtcagctctttccagacaatggrccaaatggtgtcaaatatgagaaactatatgcagaaattagaaagaaacttcggtcaactttcagtggatccaaatggacattcattttgttcttcctca

SEQ ID NO: 275 - DNA, 201 bp, Homo sapiens; identical to SEQ ID NO: 266

SEQ ID NO: 276 - DNA, 201 bp, Homo sapiens; identical to SEQ ID NO: 267

SEQ ID NO: 277 - DNA, 201 bp, Homo sapiens; identical to SEQ ID NO: 268

SEQ ID NO: 278 - DNA, 201 bp, Homo sapiens
gggaaggttgtagacataatccaaggccttgaccttctgacggccatggttctggtgaaccacattttctttaaagccaagtgggaaaagccctttcaccytgaatatacaagaaagaacttcccattcctggtgggcgagcaggtcactgtgcatgtccccatgatgcaccagaaagagcagttcgcttttggggtggat

SEQ ID NO: 279 - DNA, 201 bp, Homo sapiens
ctaacacctcagctctgatcctggagggcctgggattcaacctcacagaaacccctgaagccgacatccaccagggcttccggagcctcctccacaccctkgccctgcccagccccaaactcgaactaaaagtaggaaactccctgttcctagacaagcgactaaagcctcggcagcactatttggacagcatcaaggagc

SEQ ID NO: 280 - DNA, 201 bp, Homo sapiens
ccaccagggcttccggagcctcctccacacccttgccctgcccagccccaaactcgaactaaaagtaggaaactccctgttcctagacaagcgactaaagyctcggcagcactatttggacagcatcaaggagctttatggagcttttgctttttctgccaacttcacagattctgttacaactgggaggcagattaatga

SEQ ID NO: 281 - DNA, 201 bp, Homo sapiens
ctgcagatggattacaagggagatgccgtggccttctttgtcctccctagcaagggcaagatgaggcaactggaacaggccttgtcagccagaacactgakaaagtggagccactcactccagaaaaggtggatagaggtgttcatccccagattttccatttctgcctcctacaatctggaaaccatcctcccgaagatg

SEQ ID NO: 282 - DNA, 201 bp, Homo sapiens
aggagctgcagctgcaggcaaatttcttgggcaatgtcaagaggctgtatgaagcagaagtcttttctacagatttctccaacccctccattgcccaggcraggatcaacagccatgtgaaaaagaagacccaagggaaggttgtagacataatccaaggccttgaccttctgacggccatggttctggtgaaccacattt

SEQ ID NO: 283 - DNA, 201 bp, Homo sapiens
acttcactgtctccttcaataggaccttcctgatgatgattacaaataaagccacagacgttcccagaattgacctgacaaatattgaccaggttgctgtsatcttcaaacaccattttcctgtgggtagaggtgatgcagtgctgaagacctgggcccctgctcagtgcctttgctctagaatgggtccagcttggcttt

SEQ ID NO: 284 - DNA, 201 bp, Homo sapiens
ccgcccttcctccacaaagagcacccctgcctcacaggtgtattccctcaacaccgactttgccttccgcctataccgcaggctggttttggagaccccgrgtcagaacatcttcttctcccctgtgagtgtctccacttccctggccatgctctcccttggggcccactcagtcaccaagacccagattctccagggcct

SEQ ID NO: 285 - DNA, 201 bp, Homo sapiens
tgaaccacattttctttaaagccaagtgggaaaagccctttcaccctgaatatacaagaaagaacttcccattcctggtgggcgagcaggtcactgtgcawgtccccatgatgcaccagaaagagcagttcgcttttggggtggatacagagctgaactgctttgtgctgcagatggattacaagggagatgccgtggcct

SEQ ID NO: 286 - DNA, 133 bp, Homo sapiens
atggaggccagtaccatcgatgactcaggacayttactagccaactccccgacttcagacatattttgttccaaaatggcatcttacctttatggagtactctttgctgttggcctctgtgctccaatctact

SEQ ID NO: 287 - DNA, 127 bp, Homo sapiens
atggaggccagtaccatcgatgactcrggacatttactagccaactccccgacttcagacatattttgttccaaaatggcatcttacctttatggagtactctttgctgttggcctctgtgctccaa

SEQ ID NO: 288 - DNA, 201 bp, Homo sapiens
tccccgacttcagacatattttgttccaaaatggcatcttacctttatggagtactctttgctgttggcctctgtgctccaatctactgtgtgtccccggycaatgcccccagtgcatacccccgcccttcctccacaaagagcacccctgcctcacaggtgtattccctcaacaccgactttgccttccgcctataccgc

SEQ ID NO: 289 - DNA, 201 bp, Homo sapiens
tttctaaagcaacccacaaggctgtgctggatgtcagtgaagagggcactgaggccacagcagctaccaccaccaagttcatagtccgatcgaaggatggyccctcttacttcactgtctccttcaataggaccttcctgatgatgattacaaataaagccacagacgttcccagaattgacctgacaaatattgaccagg

SEQ ID NO: 290 - DNA, 201 bp, Homo sapiens
tcactccagaaaaggtggatagaggtgttcatccccagattttccatttctgcctcctacaatctggaaaccatcctcccgaagatgggcatccaaaatgyctttgacaaaaatgctgatttttctggaattgcaaagagagactccctgcaggtttctaaagcaacccacaaggctgtgctggatgtcagtgaagagggc

SEQ ID NO: 291 - DNA, 201 bp, Homo sapiens
ggttttggagaccccgagtcagaacatcttcttctcccctgtgagtgtctccacttccctggccatgctctcccttggggcccactcagtcaccaagaccsagattctccagggcctgggcttcaacctcacacacacaccagagtctgccatccaccagggcttccagcacctggttcactcactgactgttcccagcaa

SEQ ID NO: 292 - DNA, 201 bp, Homo sapiens
cccaggcgaggatcaacagccatgtgaaaaagaagacccaagggaaggttgtagacataatccaaggccttgaccttctgacggccatggttctggtgaaycacattttctttaaagccaagtgggaaaagccctttcaccctgaatatacaagaaagaacttcccattcctggtgggcgagcaggtcactgtgcatgtcc

SEQ ID NO: 293 - DNA, 201 bp, Homo sapiens
aaaagaagacccaagggaaggttgtagacataatccaaggccttgaccttctgacggccatggttctggtgaaccacattttctttaaagccaagtgggaraagccctttcaccctgaatatacaagaaagaacttcccattcctggtgggcgagcaggtcactgtgcatgtccccatgatgcaccagaaagagcagttcg

SEQ ID NO: 294 - DNA, 201 bp, Homo sapiens
tatggagtactctttgctgttggcctctgtgctccaatctactgtgtgtccccggccaatgcccccagtgcatacccccgcccttcctccacaaagagcayccctgcctcacaggtgtattccctcaacaccgactttgccttccgcctataccgcaggctggttttggagaccccgagtcagaacatcttcttctcccct

SEQ ID NO: 295 - DNA, 201 bp, Homo sapiens
aagacccagattctccagggcctgggcttcaacctcacacacacaccagagtctgccatccaccagggcttccagcacctggttcactcactgactgttcycagcaaagacctgaccttgaagatgggaagtgccctcttcgtcaagaaggagctgcagctgcaggcaaatttcttgggcaatgtcaagaggctgtatgaa

SEQ ID NO: 296 - DNA, 201 bp, Homo sapiens
accagagtctgccatccaccagggcttccagcacctggttcactcactgactgttcccagcaaagacctgaccttgaagatgggaagtgccctcttcgtcmagaaggagctgcagctgcaggcaaatttcttgggcaatgtcaagaggctgtatgaagcagaagtcttttctacagatttctccaacccctccattgccca

SEQ ID NO: 297 - DNA, 201 bp, Homo sapiens
aggcaagtttctttgtggatgagaggacttctctccaggtccccatgatgcaccaaaaggaaatgcacagattcctctatgaccaggatttggcttgcacygtcctccagatagaatacagaggaaatgccttggcgctgctggtcctccctgacccggggaaaatgaagcaggtggaggctgctctgcagccacagaccc

SEQ ID NO: 298 - DNA, 201 bp, Homo sapiens
ccggagttcagccaggacacgttcatggttcttgccaattacatcttcttcaaagccaagtggaagcaccctttcagtcgctaccagacccagaagcaggmaagtttctttgtggatgagaggacttctctccaggtccccatgatgcaccaaaaggaaatgcacagattcctctatgaccaggatttggcttgcaccgtc

SEQ ID NO: 299 - DNA, 201 bp, Homo sapiens
aaaacctggaggccagaggaatggcccaagcccacagcctgcctgtccacgtgagggagggtccatgggaagttggaggaaggtcagagcatgtgatgaakaagccagtttgggaagaagaattgcgaatgtcaggtcctgccaagtggcagaacgtcagcctggaaagctggaaccagccaaggaaattagggaggcaga

SEQ ID NO: 300 - DNA, 201 bp, Homo sapiens
gcaggtagcccatttcctgtgacgagaatgtcttcaagatcaagtgacgcaaaaccactgcccgcgtcctatccagctgaacctagggagccccaggaaastccgaaaatcaccagtgctttcagctctgtgaaaccaagtgaagcggtccctcggaagtttgacagtggtggagagaggggggcagggctcccactgtcc

SEQ ID NO: 301 - DNA, 201 bp, Homo sapiens
gtcagcctccttcaggcccccctggaactgggaatgagtatggtgtgagcccccgcttgcctcaggggctccccgcacatccccgacctgtcactgcctaygacggcttcgttcagtacattccctttgatgatccacggttacgacattttaaactagctcagccccagggtttctgtgaagacataaagcttgacgata

SEQ ID NO: 302 - DNA, 201 bp, Homo sapiens
cctgggatttgatcagtcagttagaaagttttaacaaggagctccaggaagaggaagaaagcagcagtagcagcagcagcagcagcagcagcagtgaggaragtgaggcggagccgcagcaggagaaccgtgctcactgcagacaggaggatgtgggcttccgcggaaacagcccggaaatgagggttgagccacagccga

SEQ ID NO: 303 - DNA, 201 bp, Homo sapiens
agcctccttcaggcccccctggaactgggaatgagtatggtgtgagcccccgcttgcctcaggggctccccgcacatccccgacctgtcactgcctatgayggcttcgttcagtacattccctttgatgatccacggttacgacattttaaactagctcagccccagggtttctgtgaagacataaagcttgacgataaat

SEQ ID NO: 304 - DNA, 201 bp, Homo sapiens
cggaggcggggttttgtaatcaacccccctcagcatggtcctctcatcccccgactggtaacgaccaagcctaccggagaagaggacggcaagaagccagragccagaagccgagggagcacgaaaacctggaggccagaggaatggcccaagcccacagcctgcctgtccacgtgagggagggtccatgggaagttggag

SEQ ID NO: 305 - DNA, 201 bp, Homo sapiens
aggccctcacaggaagcatgggtgggagaacggagttccaaaaacaagatctaggggaaccagaagaagacagacaaacaaatgacctcagtttcatccaycttacaaagcacagagaactcaagcattctggctcttggccagggcaccggtacagagatcagcaaacacaaaccagtttctccgaggagccccaaagtt

SEQ ID NO: 306 - DNA, 201 bp, Homo sapiens
ctccgaccgagaaggctggggccagcggtcagcctccttcaggcccccctggaactgggaatgagtatggtgtgagcccccgcttgcctcaggggctcccygcacatccccgacctgtcactgcctatgacggcttcgttcagtacattccctttgatgatccacggttacgacattttaaactagctcagccccagggtt

SEQ ID NO: 307 - DNA, 201 bp, Homo sapiens
cgcctgatgagaatgaaagaggtgagctcagtgtcacggatgagagtcctgagcttcaggaatgccgactcccaggaggacgccgaggaattgaaggccaycacaaggggccaggccgggctcccgggaggccttgtgtctcctggcagtggggaccgtgcccagagattgggccactcactctctgtgtccaaggacagc

SEQ ID NO: 308 - DNA, 201 bp, Homo sapiens
aaggagcatccggcagcacaaaaggagaagagcatggatcaagacttctggtgcccagattcctatgaccctagcagagtggagagggtgtgatgaaatgycggtggagcttgcattccgttgcgaattgagtattctcaagtagctggtagatttagtctatcagccccacttccccatgtagaagctggaagctgctga

SEQ ID NO: 309 - DNA, 201 bp, Homo sapiens
ccacccacgtgcctggcctccatccccgggccgctttcgcgtggaagaaggtggcggtgcacctttctgctcagcagatggaagcacgagtgcagagaagrgacacctggaggttagcaacggaatggacgagctggcaggtagcccatttcctgtgacgagaatgtcttcaagatcaagtgacgcaaaaccactgcccgc

SEQ ID NO: 310 - DNA, 201 bp, Homo sapiens
cgccctcatacagatcgcccccgcagaacatcccaaacccctacttggaagacacggtgcccataaatgtgtgtggcggtcacagtcaacagcagtctccraccgagaaggctggggccagcggtcagcctccttcaggcccccctggaactgggaatgagtatggtgtgagcccccgcttgcctcaggggctccccgcac

SEQ ID NO: 311 - DNA, 201 bp, Homo sapiens
actggcctccccgcctaggagagcagaccctgaccgcctgatgagaatgaaagaggtgagctcagtgtcacggatgagagtcctgagcttcaggaatgccractcccaggaggacgccgaggaattgaaggccaccacaaggggccaggccgggctcccgggaggccttgtgtctcctggcagtggggaccgtgcccagag

SEQ ID NO: 312 - DNA, 201 bp, Homo sapiens
ccagactgtgatcattttttgcagcagcaaaatgacttattctgacagcatctcggtttggggcttctgaagaaaaaggatgaagctgatctgttgaaacwactactttcccaactcggaggcaaaaggggctgatagaagataacattcacctaccatttcatcttgtgacccccagagatcacgtttgcgtgttctggc

SEQ ID NO: 313 - DNA, 201 bp, Homo sapiens
ccgagggagcacgaaaacctggaggccagaggaatggcccaagcccacagcctgcctgtccacgtgagggagggtccatgggaagttggaggaaggtcagrgcatgtgatgaagaagccagtttgggaagaagaattgcgaatgtcaggtcctgccaagtggcagaacgtcagcctggaaagctggaaccagccaaggaaa

SEQ ID NO: 314 - DNA, 201 bp, Homo sapiens
actccagtcctgtcactgctcaagagccggctcatggaggaatgcagcctgatggtgccatttggaatccacagagcttaatacccccgtcgggggatgasagaggcctggtcttggccgattccagcccccggtggctgtggggccagccccccggggatggggaaaacagtggcctccccaaccagagagaccgctgtg

SEQ ID NO: 315 - DNA, 201 bp, Homo sapiens
tcaagagccggctcatggaggaatgcagcctgatggtgccatttggaatccacagagcttaatacccccgtcgggggatgagagaggcctggtcttggccrattccagcccccggtggctgtggggccagccccccggggatggggaaaacagtggcctccccaaccagagagaccgctgtgtggcaaggggacagtggcc

SEQ ID NO: 316 - DNA, 201 bp, Homo sapiens
gtggcctccccaaccagagagaccgctgtgtggcaaggggacagtggcctgatgtgagaggcagccagcacgggcacactggaagacaagtttcctccccwtactcacagggcgagagcacctgcgaaactcaaaccaagctcaaaaagttccaaactgggactcggaccaagaaaagttcaaagaaaaaaatgaacgaga

SEQ ID NO: 317 - DNA, 201 bp, Homo sapiens
aaatctttccaagccttttcaaaacacttatctgcagtccagaattcagctcttatgaaaagtgagagtgcactccagttttcacagcagcaataagtgcrggaaacaaaaagatcctcttcccaggaaaagttgagtggggaagagttcagacactgttgtagctggtgaatcattgaagtcacctggtagtaccaaata

SEQ ID NO: 318 - DNA, 201 bp, Homo sapiens
tcttccttccttctgtcctccctcccttgctacctcttgccctccttccttcaccctgtcctccttttcccttttattttttccccttctctttcattttmttttcttttagagaaaccaccttatctatttttagacatttcgaattcctaaaatgtgaaccgttgggtgatctgtcctttggccctaaaacggctggcc

SEQ ID NO: 319 - DNA, 201 bp, Homo sapiens
ccttttcccttttattttttccccttctctttcattttattttcttttagagaaaccaccttatctatttttagacatttcgaattcctaaaatgtgaacygttgggtgatctgtcctttggccctaaaacggctggccgggctgtcccggcctgttctcatctgtaccgtatgattttatttcataataactttatgtat

SEQ ID NO: 320 - DNA, 201 bp, Homo sapiens
tgtacccattcattcaaggagaacatgtgttgaattctcaaaacaaagggaagtctcgctcactgcctagagttctttcccccgagagcctgagttgcacrgaaattcccattccattaaatgaaagacattcacctaaaatgccaccgtatcctcccacttgcgcaccaaatttggactccacgaggaattctgagaaga

SEQ ID NO: 321 - DNA, 201 bp, Homo sapiens
aggaggaaccctttccgtatgaaagacaggccctactagggcttacaaccaagccaaaggaccatctcttctttcttccacctcccttcacccctgccccrcagcagagccgagatgtgagacattcattgtcacggagcaaggagacaaaggcaagttcaagttgagaagcatatggcagcaaacagaaatgaaaaccat

SEQ ID NO: 322 - DNA, 201 bp, Homo sapiens
cttactcacagggcgagagcacctgcgaaactcaaaccaagctcaaaaagttccaaactgggactcggaccaagaaaagttcaaagaaaaaaatgaacgaractatattttgcttggtttctatcccagtgaaatcagaatcacatctgccagatagagatatggacaacaatgacttaaagcccagtgctgatcaaaaga

SEQ ID NO: 323 - DNA, 148 bp, Homo sapiens
aaagtagcagataaaatgccggcaaagcacagatgaatgtcttcaagaagctcttgtatttctctgcacagtgtaaatatccttgctatttcaggatggcrgctggcctgctcagtaacatacatgttccaaataaagattttgcatg

SEQ ID NO: 324 - DNA, 201 bp, Homo sapiens
agtgagctagaggggtctttgggtgaagcaagcacaatagaaatccccccaggtgagtccttgcaagccagggctgcaaggatcctgggcattgaggtggsggtggagtccctcctgccgggcatccggagagcgggacagaaccagcctgctgagcccgatgcaagtgcctgcaccccagagtccccccaggaagagttg

SEQ ID NO: 325 - DNA, 201 bp, Homo sapiens
agatcagcaaacacaaaccagtttctccgaggagccccaaagttcgcagctgctccctggtgcaaagctgggagggccgagtcgtgcagcattgagtccaraatgttcagaccctgctgcctccgaagctcagacgcacacagcattccctaccggtgatcacaaacagaggccaagtgcccgtaacctgaaaggtcacag

SEQ ID NO: 326 - DNA, 201 bp, Homo sapiens
ctggggccagcggtcagcctccttcaggcccccctggaactgggaatgagtatggtgtgagcccccgcttgcctcaggggctccccgcacatccccgaccygtcactgcctatgacggcttcgttcagtacattccctttgatgatccacggttacgacattttaaactagctcagccccagggtttctgtgaagacataa

SEQ ID NO: 327 - DNA, 201 bp, Homo sapiens
tccgaccgagaaggctggggccagcggtcagcctccttcaggcccccctggaactgggaatgagtatggtgtgagcccccgcttgcctcaggggctccccrcacatccccgacctgtcactgcctatgacggcttcgttcagtacattccctttgatgatccacggttacgacattttaaactagctcagccccagggttt

SEQ ID NO: 328 - DNA, 201 bp, Homo sapiens
cgcagctgctccctggtgcaaagctgggagggccgagtcgtgcagcattgagtccaaaatgttcagaccctgctgcctccgaagctcagacgcacacagcrttccctaccggtgatcacaaacagaggccaagtgcccgtaacctgaaaggtcacaggtccctcagcccatccagcaacagtgcgttctcaaggacttcct

SEQ ID NO: 329 - DNA, 201 bp, Homo sapiens
gtttatgcattttttcatgcatttttttccttctttctaagtaaggtattcctgacaactaacattccctaaatcatttcccctccctccctccctccctyccttcctttcttccttccttctgtcctccctcccttgctacctcttgccctccttccttcaccctgtcctccttttcccttttattttttccccttctct

SEQ ID NO: 330 - DNA, 201 bp, Homo sapiens
agcagtctccgaccgagaaggctggggccagcggtcagcctccttcaggcccccctggaactgggaatgagtatggtgtgagcccccgcttgcctcagggsctccccgcacatccccgacctgtcactgcctatgacggcttcgttcagtacattccctttgatgatccacggttacgacattttaaactagctcagcccc

SEQ ID NO: 331 - DNA, 201 bp, Homo sapiens
ttttttcatgcatttttttccttctttctaagtaaggtattcctgacaactaacattccctaaatcatttcccctccctccctccctcccttccttccttycttccttccttctgtcctccctcccttgctacctcttgccctccttccttcaccctgtcctccttttcccttttattttttccccttctctttcatttta

SEQ ID NO: 332 - DNA, 201 bp, Homo sapiens
tccgaggagccccaaagttcgcagctgctccctggtgcaaagctgggagggccgagtcgtgcagcattgagtccaaaatgttcagaccctgctgcctccgmagctcagacgcacacagcattccctaccggtgatcacaaacagaggccaagtgcccgtaacctgaaaggtcacaggtccctcagcccatccagcaacagt

SEQ ID NO: 333 - DNA, 201 bp, Homo sapiens
tgcatttttttccttctttctaagtaaggtattcctgacaactaacattccctaaatcatttcccctccctccctccctcccttccttcctttcttccttycttctgtcctccctcccttgctacctcttgccctccttccttcaccctgtcctccttttcccttttattttttccccttctctttcattttattttcttt

SEQ ID NO: 334 - DNA, 201 bp, Homo sapiens
tacatgtaaatcttttttggggggaaggtaacttgaaaagtttaacttgaaaatttgacctttaaactttcatattctaaggtaaataatagcctataacyaacaacagctttcccagaggtcttgaatttaacactaattgtttagttattgtttctatttctcatacatacataacttcgttttttgtggctggaagaa

SEQ ID NO: 335 - DNA, 201 bp, Homo sapiens
ttttgtggctggaagaaaaagtttctatattttgtatttgtctttgttcttctcatgcacacaatttactgttggtgtttaataatttggagctcataaarttaaaagttgtaattttgaccatttgggctaaaaattatatgagggattacatatgcaatggattagtatttcttgatttgcaaaagaagggaaaatgat

SEQ ID NO: 336 - DNA, 201 bp, Homo sapiens
ctgatagaagataacattcacctaccatttcatcttgtgacccccagagatcacgtttgcgtgttctggctgagttttttattattgtttgttttaaatgrttaaataatacacaattaaatgtcaggatagcatctcttgcaaagtgaccagtgcagcagaattgtctttctatccatatttgagcttagagaaacattt

SEQ ID NO: 337 - DNA, 201 bp, Homo sapiens
taaaatttagtgaagacaaggccttgcaactccaaagaaactttttttcccccccttgaaacagggtcttgctctgttgcccagcctggagtgcagtggtrcagtcacggctcactgcagcctcaagctcctgggctcaagcactatccccacctcaacctccttagtagctgggactacaggtgcacaccaccatgccca

SEQ ID NO: 338 - DNA, 201 bp, Homo sapiens
ccgggcatccggagagcgggacagaaccagcctgctgagcccgatgcaagtgcctgcaccccagagtccccccaggaagagttgctatctcgcccagcacyggcagatgtccccagggtgtccactgatgccttttatggcaggaggaagtgcggctggaccaagagccctctctttgtaggggacagggacagtgccagg

SEQ ID NO: 339 - DNA, 201 bp, Homo sapiens
tttcaatgtggaagatctagcaaatgctttggaaaggcctgtgaatggtgtgctcccctctgtgtctccatggcctgcagtccatgctcttgtgaaggagkttgggacactggctgttgcccggtgtttcagcactttcagtttaggggaaatgtgaatcaataggtatgatccatttctaatcaatttggccttctgctg

SEQ ID NO: 340 - DNA, 181 bp, Homo sapiens
atggcttggaccagggctgagcagtgtgggtggcaagaagcgtgttcagatttggaggttttgccaatgggacctgctgaygaaaagccctctccattgaatggtagtaggagggagaggagaaagaacattccgtctgactttgagccaggacttgaagcagacactatggctcatgcag

SEQ ID NO: 341 - DNA, 201 bp, Homo sapiens
aagaagcgtgttcagatttggaggttttgccaatgggacctgctgatgaaaagccctctccattgaatggtagtaggagggagaggagaaagaacattccrtctgactttgagccaggacttgaagcagacactatggctcatgcagaaaagaaacttcttcccacaagactgccagcgaaattttgcagactcaagatgt

SEQ ID NO: 342 - DNA, 150 bp, Homo sapiens
tatctgagaccatcttctgtgaagtttattcagctcataagtgtgaataaaaaattgctaaatgtgaactcaaagagacagtgcagttttacatctgagtscactgaatgcatcacagaagcagcatgtgcagcaacaggagtccaatag

SEQ ID NO: 343 - DNA, 137 bp, Homo sapiens
atgtacacctgtgccaagtgtgttcccacctttctcygtttgagagcacctgtcaggtgctaagcccaccactctctgcagtagttctcaagcaaccagagacactaacagatgagagcttcagcagtttggcagcc

SEQ ID NO: 344 - DNA, 201 bp, Homo sapiens
gtacacctgtgccaagtgtgttcccacctttctctgtttgagagcacctgtcaggtgctaagcccaccactctctgcagtagttctcaagcaaccagagayactaacagatgagagcttcagcagtttggcagccccacatcccccgacctcacttaaccctagtcacagcttccaaaccagcaccacttcaagggatatt

SEQ ID NO: 345 - DNA, 201 bp, Homo sapiens
gccaagtgtgttcccacctttctctgtttgagagcacctgtcaggtgctaagcccaccactctctgcagtagttctcaagcaaccagagacactaacagaygagagcttcagcagtttggcagccccacatcccccgacctcacttaaccctagtcacagcttccaaaccagcaccacttcaagggatattggcatagcag

SEQ ID NO: 346 - DNA, 201 bp, Homo sapiens
caaccagagacactaacagatgagagcttcagcagtttggcagccccacatcccccgacctcacttaaccctagtcacagcttccaaaccagcaccacttyaagggatattggcatagcagccaagttcattggggctaggacttccaaagtcaggacagctggctctggggctaaaattgcagctgtgtttgggagcctc

SEQ ID NO: 347 - DNA, 146 bp, Homo sapiens
cattcccatctctcaacatttccatggcctctggagatagtcctctcttgttcttgttctatgtaaaagacctggagtctgacccctttgtccccatggakgtaacaggatactggaagagacttttcctggtaccccagaattga

SEQ ID NO: 348 - DNA, 201 bp, Homo sapiens
accctgaagaccctcacgagctgctgtgggggatcttggcaaccacccttccttgccagccaggtcctcactgctggagcagtggatatatttatggatcygaagctttgccatgaagaggcaccatgcacctcctcattcccatctctcaacatttccatggcctctggagatagtcctctcttgttcttgttctatgta

SEQ ID NO: 349 - DNA, 201 bp, Homo sapiens
ctcttcagaagcaagcctctctaaaggaggcctttgaagaaaaggcgagtgatcagaataaagagagggagcgggggtggggagggggcgggagcaccgastggctgtctgactcctccggtcagaggtaccagaataggctaaatatccccagcggctgccatcccagcgggtgggatgagagcgagcctgagctctgct

SEQ ID NO: 350 - DNA, 201 bp, Homo sapiens
gctacacaagctaaagctggtaacccaaccctgaagaccctcacgagctgctgtgggggatcttggcaaccacccttccttgccagccaggtcctcactgytggagcagtggatatatttatggatctgaagctttgccatgaagaggcaccatgcacctcctcattcccatctctcaacatttccatggcctctggagat

SEQ ID NO: 351 - DNA, 201 bp, Homo sapiens
gagggggcgggagcaccgagtggctgtctgactcctccggtcagaggtaccagaataggctaaatatccccagcggctgccatcccagcgggtgggatgasagcgagcctgagctctgctcccttgatctcctctgcgtctctgctggatggcagggccagccccgggacaaaatccaaatgttggtcaaagtcctttttc

SEQ ID NO: 352 - DNA, 201 bp, Homo sapiens
tacacaagctaaagctggtaacccaaccctgaagaccctcacgagctgctgtgggggatcttggcaaccacccttccttgccagccaggtcctcactgctrgagcagtggatatatttatggatctgaagctttgccatgaagaggcaccatgcacctcctcattcccatctctcaacatttccatggcctctggagatag

SEQ ID NO: 353 - DNA, 201 bp, Homo sapiens
caggtcctcactgctggagcagtggatatatttatggatctgaagctttgccatgaagaggcaccatgcacctcctcattcccatctctcaacatttccayggcctctggagatagtcctctcttgttcttgttctatgtaaaagacctggagtctgacccctttgtccccatggaggtaacaggatactggaagagactt

SEQ ID NO: 354 - DNA, 201 bp, Homo sapiens
atatccccagcggctgccatcccagcgggtgggatgagagcgagcctgagctctgctcccttgatctcctctgcgtctctgctggatggcagggccagccycgggacaaaatccaaatgttggtcaaagtcctttttctcccagacatgttcacacgtgggtgcaagctgatctccattgtcagtacacagatgcccatga

SEQ ID NO: 355 - DNA, 201 bp, Homo sapiens
cgggacaaaatccaaatgttggtcaaagtcctttttctcccagacatgttcacacgtgggtgcaagctgatctccattgtcagtacacagatgcccatgawtaatgccgtggatatacacatgtgtgttgcacaagctacacaagctaaagctggtaacccaaccctgaagaccctcacgagctgctgtgggggatcttgg

SEQ ID NO: 356 - DNA, 113 bp, Homo sapiens
atgcctctgaacktggctcttcagaagcaagcctctctaaaggaggcctttgaagaaaaggcgagtgatcagaataaagagagggagcgggggtggggagggggcgggagcac

SEQ ID NO: 357 - DNA, 201 bp, Homo sapiens
gaataaagagagggagcgggggtggggagggggcgggagcaccgagtggctgtctgactcctccggtcagaggtaccagaataggctaaatatccccagcrgctgccatcccagcgggtgggatgagagcgagcctgagctctgctcccttgatctcctctgcgtctctgctggatggcagggccagccccgggacaaaat

SEQ ID NO: 358 - DNA, 201 bp, Homo sapiens
ctgggtttctaaatttcctcctcctccacgtagtgtctaccctctgcctgtctttctgcaagcctgatcgagttaaccagtattactgtgatatctcaccratgggggccctgttgtgccagtccatgcacctggcaaacatgcttgttttagtggaatcagttatcttggggatcagtgcttttctggctgcctttaact

SEQ ID NO: 359 - DNA, 201 bp, Homo sapiens
atgttttccttctgacactggctgttgtggacatcatctgcacaacaagcatcataccgaagatgctggggaccatgctaacatcagaaaataccatttcwtatgcaggctgcatgtcccagctcttcttgttcacatggtctctgggagctgagatggttctcttcaccaccatggcctatgaccgctatgtggccattt

SEQ ID NO: 360 - DNA, 201 bp, Homo sapiens
gcacacagctcttatcatgaggttgactttctgtgggccaaacaccattgaccacttcttctgtgagatacccccattgctggctttgtcctgtagccctstaagaatcaatgaggtgatggtgtatgttgctgatattaccctggccataggggactttattcttacctgcatctcctatggttttatcattgttgctat

SEQ ID NO: 361 - DNA, 201 bp, Homo sapiens
ttgctgatattaccctggccataggggactttattcttacctgcatctcctatggttttatcattgttgctattctccgtatccgcacagtagaaggcaakaggaaggccttctcaacatgctcatctcatctcacagtggtgaccctttactattctcctgtaatctacacctatatccgccctgcttccagctatacat

SEQ ID NO: 362 - DNA, 201 bp, Homo sapiens
cttcttgttcacatggtctctgggagctgagatggttctcttcaccaccatggcctatgaccgctatgtggccatttgtttccctcttcattacagtactrttatgaaccaccatatgtgtgtagccttgctcagcatggtcatggctattgcagtcaccaattcctgggtgcacacagctcttatcatgaggttgacttt

SEQ ID NO: 363 - DNA, 201 bp, Homo sapiens
aatcaatgaggtgatggtgtatgttgctgatattaccctggccataggggactttattcttacctgcatctcctatggttttatcattgttgctattctcygtatccgcacagtagaaggcaagaggaaggccttctcaacatgctcatctcatctcacagtggtgaccctttactattctcctgtaatctacacctatat

SEQ ID NO: 364 - DNA, 201 bp, Homo sapiens
tggggaccatgctaacatcagaaaataccatttcatatgcaggctgcatgtcccagctcttcttgttcacatggtctctgggagctgagatggttctcttyaccaccatggcctatgaccgctatgtggccatttgtttccctcttcattacagtactgttatgaaccaccatatgtgtgtagccttgctcagcatggtca

SEQ ID NO: 365 - DNA, 201 bp, Homo sapiens
ggcctcaccaaaaagcctgaactccagggaattatcttcctcttttttctcattgtctatcttgtggcttttctcggcaacatgctcatcatcattgccawaatctataacaacaccttgcatacgcccatgtatgttttccttctgacactggctgttgtggacatcatctgcacaacaagcatcataccgaagatgctg

SEQ ID NO: 366 - DNA, 201 bp, Homo sapiens
atgtatgttttccttctgacactggctgttgtggacatcatctgcacaacaagcatcataccgaagatgctggggaccatgctaacatcagaaaataccakttcatatgcaggctgcatgtcccagctcttcttgttcacatggtctctgggagctgagatggttctcttcaccaccatggcctatgaccgctatgtggcc

SEQ ID NO: 367 - DNA, 201 bp, Homo sapiens
ttatcatgaggttgactttctgtgggccaaacaccattgaccacttcttctgtgagatacccccattgctggctttgtcctgtagccctgtaagaatcaaygaggtgatggtgtatgttgctgatattaccctggccataggggactttattcttacctgcatctcctatggttttatcattgttgctattctccgtatcc

SEQ ID NO: 368 - DNA, 201 bp, Homo sapiens
acgagtgacattggctgacatcacagttgtctgcaccctgttgtggctctataagcaggttctagagccttctttccgccgggcctttcgcaataccaacygctggttcctcacctgcattaaccagccccagttccgggctgtcttgggggaactgaaactgtgtgagaagatggcccagtttgatgctaaaaagtttgc

SEQ ID NO: 369 - DNA, 201 bp, Homo sapiens
gagggccttcaaggctctcatcgctgctcagtacagcggggctcagatccgcgtgctctccgcaccaccccacttccattttggccaaaccaaccgcaccyctgaatttcttcgcaaatttcctgccggcaaggtcccagcatttgagggtgatgatggattctgtgtgtttgagagcaacgccattgcctactatgtgag

SEQ ID NO: 370 - DNA, 201 bp, Homo sapiens
ggcggaaactggatcctggcagagaggagacccagacgctggttcgagagtacttttcctgggagggggccttccagcatgtgggcaaagccttcaatcasggcaagatcttcaagtgaacatctcttgccatcacctagctgcctgcacctgcccttcagggagatgggggtcattaaaggaaactgaacattgaaaaaa

SEQ ID NO: 371 - DNA, 201 bp, Homo sapiens
gagtctgggtcttccgaggccaggagcttgcctttccgctgagtccagattggcaggtggactacgagtcatacacatggcggaaactggatcctggcagmgaggagacccagacgctggttcgagagtacttttcctgggagggggccttccagcatgtgggcaaagccttcaatcacggcaagatcttcaagtgaacat

SEQ ID NO: 372 - DNA, 201 bp, Homo sapiens
tctttgcggaatcaccatggcggctgggaccctgtacacgtatcctgaaaactggagggccttcaaggctctcatcgctgctcagtacagcggggctcagrtccgcgtgctctccgcaccaccccacttccattttggccaaaccaaccgcacctctgaatttcttcgcaaatttcctgccggcaaggtcccagcatttga

SEQ ID NO: 373 - DNA, 201 bp, Homo sapiens
ctggtgggcgaacgagtgacattggctgacatcacagttgtctgcaccctgttgtggctctataagcaggttctagagccttctttccgccgggcctttcscaataccaaccgctggttcctcacctgcattaaccagccccagttccgggctgtcttgggggaactgaaactgtgtgagaagatggcccagtttgatgct

SEQ ID NO: 374 - DNA, 104 bp, Homo sapiens
ccakcctttctttgcggaatcaccatggcggctgggaccctgtacacgtatcctgaaaactggagggccttcaaggctctcatcgctgctcagtacagcggggc

SEQ ID NO: 375 - DNA, 201 bp, Homo sapiens
aggacttttctggtgggcgaacgagtgacattggctgacatcacagttgtctgcaccctgttgtggctctataagcaggttctagagccttctttccgccrggcctttcgcaataccaaccgctggttcctcacctgcattaaccagccccagttccgggctgtcttgggggaactgaaactgtgtgagaagatggcccag

SEQ ID NO: 376 - DNA, 201 bp, Homo sapiens
atttctgggagcactttgataaggacggctggtccctgtggtactcagagtatcgcttccctgaagaactcactcagaccttcatgagctgcaatctcatsactggaatgttccagcgactggacaagctgaggaagaatgccttcgccagtgtcatcctttttggaaccaacaatagcagctccatttctggagtctggg

SEQ ID NO: 377 - DNA, 201 bp, Homo sapiens
agccccaggctgagcggaaggaggagaaaaaggcggctgcccctgctcctgaggaggagatggatgaatgtgagcaggcgctggctgctgagcccaaggcyaaggaccccttcgctcacctgcccaagagtacctttgtgttggatgaatttaagcgcaagtactccaatgaggacacactctctgtggcactgccatatt

SEQ ID NO: 378 - DNA, 201 bp, Homo sapiens
aggctctcatcgctgctcagtacagcggggctcagatccgcgtgctctccgcaccaccccacttccattttggccaaaccaaccgcacctctgaatttctycgcaaatttcctgccggcaaggtcccagcatttgagggtgatgatggattctgtgtgtttgagagcaacgccattgcctactatgtgagcaatgaggagc

SEQ ID NO: 379 - DNA, 201 bp, Homo sapiens
ataagcaggttctagagccttctttccgccgggcctttcgcaataccaaccgctggttcctcacctgcattaaccagccccagttccgggctgtcttgggsgaactgaaactgtgtgagaagatggcccagtttgatgctaaaaagtttgcagagacccagcctaaaaaggacacaccacggaaagagaagggttcacggg

SEQ ID NO: 380 - DNA, 201 bp, Homo sapiens
atttgagggtgatgatggattctgtgtgtttgagagcaacgccattgcctactatgtgagcaatgaggagctgcggggaagtactccagaggcagcagccmaggtggtgcagtgggtgagctttgctgattccgatatagtgcccccagccagtacctgggtgttccccaccttgggcatcatgcaccacaacaaacaggc

SEQ ID NO: 381 - DNA, 201 bp, Homo sapiens
agctcaattctactaaaaagccccccaagaaagcgaatgagaaaacagagtcatcctctgcacagcaagtagcagtgtcacgccttagcgcttccagctcyagctcagattccagctcctcctcttcctcgtcgtcgtcttcagacaccagtgattcagactcaggctaaggggtcaggccagatggggcaggaaggctcc

SEQ ID NO: 382 - DNA, 201 bp, Homo sapiens
atgagaaaacagagtcatcctctgcacagcaagtagcagtgtcacgccttagcgcttccagctccagctcagattccagctcctcctcttcctcgtcgtcrtcttcagacaccagtgattcagactcaggctaaggggtcaggccagatggggcaggaaggctccgcaggaccggacccctagaccaccctgccccacctg

SEQ ID NO: 383 - DNA, 201 bp, Homo sapiens
gtcaggccagatggggcaggaaggctccgcaggaccggacccctagaccaccctgccccacctgccccttccccctttgctgtgacacttcttcatctcacccccccctgcccccctctaggagagctggctctgcagtgggggagggatgcagggacatttactgaaggagggacatggacaaaacaacattgaattccc

SEQ ID NO: 384 - DNA, 201 bp, Homo sapiens
ctgctttcgtgccggccaggcagggggtttgtcgcctggaggcccaagaggaacggcctccccccaacttagcgggttatgctggaccgggcggtgagggraaccgaggccacccggactttccgcggctgagggcagcgccggttccttgcggtcaagatgctgcaaaacgtgactccccacaataagctccctggggaa

SEQ ID NO: 385 - DNA, 201 bp, Homo sapiens
tttcgtgccggccaggcagggggtttgtcgcctggaggcccaagaggaacggcctccccccaacttagcgggttatgctggaccgggcggtgaggggaacygaggccacccggactttccgcggctgagggcagcgccggttccttgcggtcaagatgctgcaaaacgtgactccccacaataagctccctggggaaggga

SEQ ID NO: 386 - DNA, 201 bp, Homo sapiens
tgggaaagacaaaggaggaactggctttggagaaaaagcgggaattagaaaagcggttacaagatgtcagcggacagctcaattctactaaaaagcccccyaagaaagcgaatgagaaaacagagtcatcctctgcacagcaagtagcagtgtcacgccttagcgcttccagctccagctcagattccagctcctcctctt

SEQ ID NO: 387 - DNA, 201 bp, Homo sapiens
gccaatagaaaaagctcccgcggagaggtgttccttccccttcgactcagcttcttcacccgcgtgagcgagcgcgcgcgcgcggagggggtggggaaaakctcaagcagggtggcgcgcatgagcggcgaagctcctcctccccgcctatatataaagggctggcgcggggctcggcggcgccatttcgtgctggagtgg

SEQ ID NO: 388 - DNA, 201 bp, Homo sapiens
gcggcgaagctcctcctccccgcctatatataaagggctggcgcggggctcggcggcgccatttcgtgctggagtggagcagcctctagaacgagctggargattctgcctaccgatacagagccttcgagtcgtccggggccgccattacaatccacctccatccgcttggaaatggccttcgtcccggcctatgactgg

SEQ ID NO: 389 - DNA, 201 bp, Homo sapiens
tccggcagcctgtggatgctgtcaaactgggtctaccggattatcacaaaattataaaacagcctatggacatgggtactattaagaggagacttgaaaayaattattattgggctgcttcagagtgtatgcaagattttaataccatgttcaccaactgttacatttacaacaagcccactgatgatattgtcctaatgg

SEQ ID NO: 390 - DNA, 201 bp, Homo sapiens
cggtcaagatgctgcaaaacgtgactccccacaataagctccctggggaagggaatgcagggttgctggggctgggcccagaagcagcagcaccagggaaraggattcgaaaaccctctctcttgtatgagggctttgagagccccacaatggcttcggtgcctgctttgcaacttacccctgccaacccaccacccccgg

SEQ ID NO: 391 - DNA, 201 bp, Homo sapiens
caagaggatttcaaagatggaggcggcggctccctaaaccacttttcgtgttcatccgcctccatccgagatcgaaacgggacctcgtcggccccgtaggrgcccgacaagaagagggaatccctgcagaccaacagcgggctatattgacgacggtgtctgagatcggggaccgtcttttgaagagtcagtccctcctta

SEQ ID NO: 392 - DNA, 201 bp, Homo sapiens
tggcttggagatgtggcgggttgccacttccctgtgggtctctgcggcactcttctgcctggtgactgacaccttggaaatgaagtttatgacgtcatcgytgcggctggccaatagaaaaagctcccgcggagaggtgttccttccccttcgactcagcttcttcacccgcgtgagcgagcgcgcgcgcgcggagggggt

SEQ ID NO: 393 - DNA, 177 bp, Homo sapiens
ctgtgtgtgttcctggtctgcggcagccatgctgaactcgtatggagaggcgagtgggggggacagagtccaggacygcgggataggaagctggggatatggacaagcagcagcgttatagcgctctgggtttcgggacataggcctgggccatgcggcccccttggccccttggcg

SEQ ID NO: 394 - DNA, 201 bp, Homo sapiens
cttcgagtcgtccggggccgccattacaatccacctccatccgcttggaaatggccttcgtcccggcctatgactggtcccagcgggcagtacagaccccytagaagcccctggagctcccctttttcgggccccgcccaatcctcggagtctgtccaccccctctactccgccctcaagaggatttcaaagatggaggcg

SEQ ID NO: 395 - DNA, 201 bp, Homo sapiens
ccggactttccgcggctgagggcagcgccggttccttgcggtcaagatgctgcaaaacgtgactccccacaataagctccctggggaagggaatgcagggytgctggggctgggcccagaagcagcagcaccagggaagaggattcgaaaaccctctctcttgtatgagggctttgagagccccacaatggcttcggtgcc

SEQ ID NO: 396 - DNA, 201 bp, Homo sapiens
acaatcccccagatcacgatgttgtggcaatggcacgaaagctacagcttcgggcagtacatgaacaactggctgctctgtcccagggtccaatatccaarcccaagaggaaaagagagaaaaaagagaaaaagaagaaacggaaggcagagaagcccccacctgccctgcctacaggttatgattcagaggaggaggaag

SEQ ID NO: 397 - DNA, 201 bp, Homo sapiens
attcccagccccattggggaccctgatctggagttacctgaggccatagctgccctattcacttctaagggccctgttttgagattgtttgttctaatttwttttaagctaggtaaggctggggggagggtggggccgtggtcccctcagcctccatggggagggaagaagggggagctctttttttacgttgattttttt

SEQ ID NO: 398 - DNA, 201 bp, Homo sapiens
ccagatcacgatgttgtggcaatggcacgaaagctacagcttcgggcagtacatgaacaactggctgctctgtcccagggtccaatatccaagcccaagargaaaagagagaaaaaagagaaaaagaagaaacggaaggcagagaagcccccacctgccctgcctacaggttatgattcagaggaggaggaagagagcagg

SEQ ID NO: 399 - DNA, 201 bp, Homo sapiens
ctttttcgggccccgcccaatcctcggagtctgtccaccccctctactccgccctcaagaggatttcaaagatggaggcggcggctccctaaaccactttkcgtgttcatccgcctccatccgagatcgaaacgggacctcgtcggccccgtaggggcccgacaagaagagggaatccctgcagaccaacagcgggctata

SEQ ID NO: 400 - DNA, 201 bp, Homo sapiens
cagatcacgatgttgtggcaatggcacgaaagctacagcttcgggcagtacatgaacaactggctgctctgtcccagggtccaatatccaagcccaagagraaaagagagaaaaaagagaaaaagaagaaacggaaggcagagaagcccccacctgccctgcctacaggttatgattcagaggaggaggaagagagcaggc

SEQ ID NO: 401 - DNA, 201 bp, Homo sapiens
agatggggcaggaaggctccgcaggaccggacccctagaccaccctgccccacctgccccttccccctttgctgtgacacttcttcatctcaccccccccygcccccctctaggagagctggctctgcagtgggggagggatgcagggacatttactgaaggagggacatggacaaaacaacattgaattcccagccccat

SEQ ID NO: 402 - DNA, 201 bp, Homo sapiens
cccctcagcctccatggggagggaagaagggggagctctttttttacgttgatttttttttttctactctgttttccctttttccttccgctccatttggrgccctgggggtttcagtcatctccccatttggtcccctggactgtctttgttgattctaacttgtaaataaagaaaatattattcaagttttgagttacc

SEQ ID NO: 403 - DNA, 109 bp, Homo sapiens
ctgtgtgtrttcctggtctgcggcagccatgctgaactcgtatggagaggcgagtgggggggacagagtccaggactgcgggataggaagctggggatatggacaagca

SEQ ID NO: 404 - DNA, 201 bp, Homo sapiens
ggtctctgcggcactcttctgcctggtgactgacaccttggaaatgaagtttatgacgtcatcgttgcggctggccaatagaaaaagctcccgcggagagrtgttccttccccttcgactcagcttcttcacccgcgtgagcgagcgcgcgcgcgcggagggggtggggaaaatctcaagcagggtggcgcgcatgagcgg

SEQ ID NO: 405 - DNA, 201 bp, Homo sapiens
gggagggatgcagggacatttactgaaggagggacatggacaaaacaacattgaattcccagccccattggggaccctgatctggagttacctgaggccayagctgccctattcacttctaagggccctgttttgagattgtttgttctaatttattttaagctaggtaaggctggggggagggtggggccgtggtcccct

SEQ ID NO: 406 - DNA, 201 bp, Homo sapiens
ggtcagccaatctgggtgctgctgacgtacgcgcgcggccccgatgctctccccacccccccagcccgttcgggaagggaggggctgggggctacgccccmtcccccagcacggcttcgttttctgggggggggttgacaccccggattacataccccgtaccaagccgagggcaactttggaggccccctggaaggcttt

SEQ ID NO: 407 - DNA, 171 bp, Homo sapiens
ctgtgtgtgttcctggtctgcggcagccatgctgaactcgtatggagaggcgagtgggggggacagagtcsaggactgcgggataggaagctggggatatggacaagcagcagcgttatagcgctctgggtttcgggacataggcctgggccatgcggcccccttggcccc

SEQ ID NO: 408 - DNA, 201 bp, Homo sapiens
aaccaccctctttccctggagtcggcggaccacagctcagccaattggcttggagatgtggcgggttgccacttccctgtgggtctctgcggcactcttcygcctggtgactgacaccttggaaatgaagtttatgacgtcatcgttgcggctggccaatagaaaaagctcccgcggagaggtgttccttccccttcgact

SEQ ID NO: 409 - DNA, 201 bp, Homo sapiens
aagctacaggatgtatttgagttccgttatgccaagatgccagatgaaccactagaaccagggcctttaccagtctctactgccatgccccctggcttggycaaatcgtcttcagagtcctccagtgaggaaagtagcagtgagagctcctctgaggaagaggaggaggaagatgaggaggacgaggaggaagaagagagt

SEQ ID NO: 410 - DNA, 201 bp, Homo sapiens; identical to SEQ ID NO: 381

SEQ ID NO: 411 - DNA, 201 bp, Homo sapiens; identical to SEQ ID NO: 382

SEQ ID NO: 412 - DNA, 201 bp, Homo sapiens; identical to SEQ ID NO: 383

SEQ ID NO: 413 - DNA, 201 bp, Homo sapiens; identical to SEQ ID NO: 384

SEQ ID NO: 414 - DNA, 201 bp, Homo sapiens
gctccagggcagtgttaccagtgcccatcaggtgcctgccgtctcttctgtgtcacacacagccctgtatactcctccacctgagatacctaccactgtcytcaacattccccacccatcagtcatttcctctccacttctcaagtccttgcactctgctggacccccgctccttgctgttactgcagctcctccagccca

SEQ ID NO: 415 - DNA, 201 bp, Homo sapiens; identical to SEQ ID NO: 385

SEQ ID NO: 416 - DNA, 201 bp, Homo sapiens; identical to SEQ ID NO: 386

SEQ ID NO: 417 - DNA, 201 bp, Homo sapiens; identical to SEQ ID NO: 387

SEQ ID NO: 418 - DNA, 201 bp, Homo sapiens; identical to SEQ ID NO: 388

SEQ ID NO: 419 - DNA, 201 bp, Homo sapiens; identical to SEQ ID NO: 389

SEQ ID NO: 420 - DNA, 201 bp, Homo sapiens; identical to SEQ ID NO: 390

SEQ ID NO: 421 - DNA, 201 bp, Homo sapiens; identical to SEQ ID NO: 391

SEQ ID NO: 422 - DNA, 201 bp, Homo sapiens
atgaagatgacaaggggcctagggcaccccgcccacctcaacctaagaagtccaagaaagcaagtggcagtgggggtggcagtgctgctttaggcccttcyggctttggaccttctggaggaagtggcaccaagctccccaaaaaggccacaaagacagccccacctgccctgcctacaggttatgattcagaggaggagg

SEQ ID NO: 423 - DNA, 201 bp, Homo sapiens; identical to SEQ ID NO: 392

SEQ ID NO: 424 - DNA, 177 bp, Homo sapiens; identical to SEQ ID NO: 393

SEQ ID NO: 425 - DNA, 201 bp, Homo sapiens; identical to SEQ ID NO: 394

SEQ ID NO: 426 - DNA, 201 bp, Homo sapiens; identical to SEQ ID NO: 395

SEQ ID NO: 427 - DNA, 201 bp, Homo sapiens
actcagaggaagaaagggctcatcgcttagcagaactacaggaacagcttcgggcagtacatgaacaactggctgctctgtcccagggtccaatatccaarcccaagaggaaaagagagaaaaaagagaaaaagaagaaacggaaggcagagaagcatcgaggccgagctggggccgatgaagatgacaaggggcctaggg

SEQ ID NO: 428 - DNA, 201 bp, Homo sapiens
aagggtgggagtgtgcaaagccctgatctggagttacctgaggccatagctgccctattcacttctaagggccctgttttgagattgtttgttctaatttwttttaagctaggtaaggctggggggagggtggggccgtggtcccctcagcctccatggggagggaagaagggggagctctttttttacgttgattttttt

SEQ ID NO: 429 - DNA, 201 bp, Homo sapiens
gaagaaagggctcatcgcttagcagaactacaggaacagcttcgggcagtacatgaacaactggctgctctgtcccagggtccaatatccaagcccaagargaaaagagagaaaaaagagaaaaagaagaaacggaaggcagagaagcatcgaggccgagctggggccgatgaagatgacaaggggcctagggcaccccgc

SEQ ID NO: 430 - DNA, 201 bp, Homo sapiens; identical to SEQ ID NO: 399

SEQ ID NO: 431 - DNA, 201 bp, Homo sapiens
aagaaagggctcatcgcttagcagaactacaggaacagcttcgggcagtacatgaacaactggctgctctgtcccagggtccaatatccaagcccaagagraaaagagagaaaaaagagaaaaagaagaaacggaaggcagagaagcatcgaggccgagctggggccgatgaagatgacaaggggcctagggcaccccgcc

SEQ ID NO: 432 - DNA, 201 bp, Homo sapiens
tgtcccagggtccaatatccaagcccaagaggaaaagagagaaaaaagagaaaaagaagaaacggaaggcagagaagcatcgaggccgagctggggccgaygaagatgacaaggggcctagggcaccccgcccacctcaacctaagaagtccaagaaagcaagtggcagtgggggtggcagtgctgctttaggcccttctg

SEQ ID NO: 433 - DNA, 201 bp, Homo sapiens; identical to SEQ ID NO: 401

SEQ ID NO: 434 - DNA, 201 bp, Homo sapiens; identical to SEQ ID NO: 402

SEQ ID NO: 435 - DNA, 109 bp, Homo sapiens; identical to SEQ ID NO: 403

SEQ ID NO: 436 - DNA, 201 bp, Homo sapiens; identical to SEQ ID NO: 404

SEQ ID NO: 437 - DNA, 201 bp, Homo sapiens
gtgggggagggatgcagggacatttactgaaggagggacatggacaaaacaacattgaattcccagccccattggggagtgatctcttggacacagagccmccattcaaaatggggcagggcaagggtgggagtgtgcaaagccctgatctggagttacctgaggccatagctgccctattcacttctaagggccctgttt

SEQ ID NO: 438 - DNA, 201 bp, Homo sapiens
ccattggggagtgatctcttggacacagagcccccattcaaaatggggcagggcaagggtgggagtgtgcaaagccctgatctggagttacctgaggccayagctgccctattcacttctaagggccctgttttgagattgtttgttctaatttattttaagctaggtaaggctggggggagggtggggccgtggtcccct

SEQ ID NO: 439 - DNA, 201 bp, Homo sapiens; identical to SEQ ID NO: 406

SEQ ID NO: 440 - DNA, 171 bp, Homo sapiens; identical to SEQ ID NO: 407

SEQ ID NO: 441 - DNA, 201 bp, Homo sapiens; identical to SEQ ID NO: 408

SEQ ID NO: 442 - DNA, 201 bp, Homo sapiens
agaacagccacaagaagggggccaagttggcagcgctccagggcagtgttaccagtgcccatcaggtgcctgccgtctcttctgtgtcacacacagccctstatactcctccacctgagatacctaccactgtcctcaacattccccacccatcagtcatttcctctccacttctcaagtccttgcactctgctggacccc

SEQ ID NO: 443 - DNA, 201 bp, Homo sapiens; identical to SEQ ID NO: 409

SEQ ID NO: 444 - DNA, 201 bp, Homo sapiens; identical to SEQ ID NO: 381

SEQ ID NO: 445 - DNA, 201 bp, Homo sapiens; identical to SEQ ID NO: 382

SEQ ID NO: 446 - DNA, 201 bp, Homo sapiens; identical to SEQ ID NO: 383

SEQ ID NO: 447 - DNA, 201 bp, Homo sapiens; identical to SEQ ID NO: 384

SEQ ID NO: 448 - DNA, 201 bp, Homo sapiens; identical to SEQ ID NO: 414

SEQ ID NO: 449 - DNA, 201 bp, Homo sapiens; identical to SEQ ID NO: 385

SEQ ID NO: 450 - DNA, 201 bp, Homo sapiens; identical to SEQ ID NO: 386

SEQ ID NO: 451 - DNA, 201 bp, Homo sapiens; identical to SEQ ID NO: 387

SEQ ID NO: 452 - DNA, 201 bp, Homo sapiens; identical to SEQ ID NO: 388

SEQ ID NO: 453 - DNA, 201 bp, Homo sapiens; identical to SEQ ID NO: 389

SEQ ID NO: 454 - DNA, 201 bp, Homo sapiens; identical to SEQ ID NO: 390

SEQ ID NO: 455 - DNA, 201 bp, Homo sapiens; identical to SEQ ID NO: 391

SEQ ID NO: 456 - DNA, 201 bp, Homo sapiens; identical to SEQ ID NO: 422

SEQ ID NO: 457 - DNA, 201 bp, Homo sapiens; identical to SEQ ID NO: 392

SEQ ID NO: 458 - DNA, 177 bp, Homo sapiens; identical to SEQ ID NO: 393

SEQ ID NO: 459 - DNA, 201 bp, Homo sapiens; identical to SEQ ID NO: 394

SEQ ID NO: 460 - DNA, 201 bp, Homo sapiens; identical to SEQ ID NO: 395

SEQ ID NO: 461 - DNA, 201 bp, Homo sapiens; identical to SEQ ID NO: 427

SEQ ID NO: 462 - DNA, 201 bp, Homo sapiens; identical to SEQ ID NO: 397

SEQ ID NO: 463 - DNA, 201 bp, Homo sapiens; identical to SEQ ID NO: 429

SEQ ID NO: 464 - DNA, 201 bp, Homo sapiens; identical to SEQ ID NO: 399

SEQ ID NO: 465 - DNA, 201 bp, Homo sapiens; identical to SEQ ID NO: 431

SEQ ID NO: 466 - DNA, 201 bp, Homo sapiens; identical to SEQ ID NO: 432

SEQ ID NO: 467 - DNA, 201 bp, Homo sapiens; identical to SEQ ID NO: 401

SEQ ID NO: 468 - DNA, 201 bp, Homo sapiens; identical to SEQ ID NO: 402

SEQ ID NO: 469 - DNA, 109 bp, Homo sapiens; identical to SEQ ID NO: 403

SEQ ID NO: 470 - DNA, 201 bp, Homo sapiens; identical to SEQ ID NO: 404

SEQ ID NO: 471 - DNA, 201 bp, Homo sapiens; identical to SEQ ID NO: 405

SEQ ID NO: 472 - DNA, 201 bp, Homo sapiens; identical to SEQ ID NO: 406

SEQ ID NO: 473 - DNA, 171 bp, Homo sapiens; identical to SEQ ID NO: 407

SEQ ID NO: 474 - DNA, 201 bp, Homo sapiens; identical to SEQ ID NO: 408

SEQ ID NO: 475 - DNA, 201 bp, Homo sapiens; identical to SEQ ID NO: 442

SEQ ID NO: 476 - DNA, 201 bp, Homo sapiens
gatatgactactctaacagtaataactataaatctcactttaaataatttaaaacaaattaaagtgatatatgagttaaatgaccaagcagacttgattcyaggaatgttaaggaatgttcattatttgttttggataatgaagtcagcagaggaaaaaaaaatatgaccatctcaaaagatgccaacgttgtctttgata

SEQ ID NO: 477 - DNA, 201 bp, Homo sapiens
tttaatatattttttaaaaaacaattcttgtaaaatacttttttgattagccttctgaccatgattaaaatggtgtacctcaaagtagctgctaaccttaygtgtatctgcaacaccctgaaaaattatctaataaaaaggcacaaagaaaaagcttgtcaatgttgtggataattagaaagtgaataattttatttaata

SEQ ID NO: 478 - DNA, 201 bp, Homo sapiens
cagagtaatcaggtaaagcttaaacaagtgttttaaaagatgagtttttcctacattctgaaaagcaaacatgaaaaactgaacacagtttttacagatayacaatatggagtgacttatatacaaaatgaccttaaaaatatattaaactcattatagtagttaatatctaagtaaaatatgatgaaatttaatagagaa

SEQ ID NO: 479 - DNA, 151 bp, Homo sapiens
tcccagcataaagttgggagtgacaccagagccttctgcaagatgcttctrattctgctgtcagtggccctgctggccttcagctcagctcaggacttagatgaagatgtcagccaagaagacgttcccttggtaatatcagatggaggag

SEQ ID NO: 480 - DNA, 201 bp, Homo sapiens
cccacctcctcctggaaagccccagggaccacctccccaagggggccgcccacaaggacctccacaggggcagtctcctcagtaatctaggattcaatgayaggaagtgaataagaagatgacagtgtttcaaatgccttgaaacataatgtgatcatgctctaacttcaatataccaataaaataatcagcttgcaattt

SEQ ID NO: 481 - DNA, 201 bp, Homo sapiens
ctcaaagtagctgctaaccttatgtgtatctgcaacaccctgaaaaattatctaataaaaaggcacaaagaaaaagcttgtcaatgttgtggataattagraagtgaataattttatttaatattagataaacaagcacataacagagatacatatattcaaatggaaggagtaaaattaccaccacatgcagatctgttt

SEQ ID NO: 482 - DNA, 201 bp, Homo sapiens
atacttttttgattagccttctgaccatgattaaaatggtgtacctcaaagtagctgctaaccttatgtgtatctgcaacaccctgaaaaattatctaatraaaaggcacaaagaaaaagcttgtcaatgttgtggataattagaaagtgaataattttatttaatattagataaacaagcacataacagagatacatata

SEQ ID NO: 483 - DNA, 201 bp, Homo sapiens
aaaagcttgtcaatgttgtggataattagaaagtgaataattttatttaatattagataaacaagcacataacagagatacatatattcaaatggaaggastaaaattaccaccacatgcagatctgtttttctgtccagaaaataacaagagattctactcaggtaaaaaaggaaaggaaggaaaaccattgtaattaaa

SEQ ID NO: 484 - DNA, 201 bp, Homo sapiens
taataactataaatctcactttaaataatttaaaacaaattaaagtgatatatgagttaaatgaccaagcagacttgattctaggaatgttaaggaatgtycattatttgttttggataatgaagtcagcagaggaaaaaaaaatatgaccatctcaaaagatgccaacgttgtctttgataatatttaatatatttttta

SEQ ID NO: 485 - DNA, 157 bp, Homo sapiens
tcccagcataaagttgggagtgacaccagagccttctgcaagatgcttctgattctsctgtcagtggccctgctggccttcagctcagctcaggacttagatgaagatgtcagccaagaagacgttcccttggtaatatcagatggaggagactctg

SEQ ID NO: 486 - DNA, 151 bp, Homo sapiens
ccaggaagctctgccgccccctccctgtccctcatgccgctcctcagctccctcagctcctagagggggaagaggagagacccccaacaaggggacaggasggtcactgtgccaatcctgtcatcaccctcctgtggatgtacaggcagtg

SEQ ID NO: 487 - DNA, 201 bp, Homo sapiens
gcaccctggcatggacgctgctgttgccgctgctgctgcgggagtcagacagcctagaaccgtcgtgcaccgtgtcctccgcggatgtggactggaacgcrgagttcagtgccacgtgcctgaatttcagtggcctcagcctgagcctgcctcacaaccagtctctgcgggccagcaacgtgattctccttgacctgtctg

SEQ ID NO: 488 - DNA, 201 bp, Homo sapiens
gccgagcaccagtgggatgaacaaggggctcacccttcagaggacaatgacttttacatcaactacaaggacatcgacctggcttcccagcctgtctactrtaacctgcagtcactgggccaggccccaatggatgaagaggagtacgtgatccccgggcactgagcctaagatgtcctaacctccacccagaaccccttc

SEQ ID NO: 489 - DNA, 201 bp, Homo sapiens
atgaagaggagtacgtgatccccgggcactgagcctaagatgtcctaacctccacccagaaccccttcagtccctgctgggtgactcagggcgtcctaackcctccatggcctcagtttccccatctgaagaatggggacaggaaaggattgtccttgaggccccaggaagctctgccgccccctccctgtccctcatgcc

SEQ ID NO: 490 - DNA, 201 bp, Homo sapiens
agatgtcctaacctccacccagaaccccttcagtccctgctgggtgactcagggcgtcctaactcctccatggcctcagtttccccatctgaagaatgggkacaggaaaggattgtccttgaggccccaggaagctctgccgccccctccctgtccctcatgccgctcctcagctccctcagctcctagagggggaagagg

SEQ ID NO: 491 - DNA, 201 bp, Homo sapiens
ggctcacccttcagaggacaatgacttttacatcaactacaaggacatcgacctggcttcccagcctgtctactgtaacctgcagtcactgggccaggccycaatggatgaagaggagtacgtgatccccgggcactgagcctaagatgtcctaacctccacccagaaccccttcagtccctgctgggtgactcagggcgt

SEQ ID NO: 492 - DNA, 201 bp, Homo sapiens
atcggggcagtggtggtcagcgggtgcctgcttcttggacttgccatcgctggccctgtgctggcctggagactctggcgatgccgagtggccagaagccsggagctgaacaaaccctgggctgctcaggatgggcccaagcccggtttaggcttgcagccacggtacggcagccggagcgcccccaagccccaagtggcc

SEQ ID NO: 493 - DNA, 201 bp, Homo sapiens
gctgaacaaaccctgggctgctcaggatgggcccaagcccggtttaggcttgcagccacggtacggcagccggagcgcccccaagccccaagtggccgtgmcatcctgcccctccactcccgactatgagaacatgtttgtgggccagccagcagccgagcaccagtgggatgaacaaggggctcacccttcagaggacaa

SEQ ID NO: 494 - DNA, 201 bp, Homo sapiens
atgatcgtggcggaaggggaagcaggcacgtcttacgtggcggtaggtgagagaggatgtgtaggaagtgaaagggtaagagccccttataaaaccatcaratctcatgagaaatcactctctatcatgaggacagcatgggggaaccacccccatgatccaaacacgtcccaccaggtctttccctcaacacctggggat

SEQ ID NO: 495 - DNA, 201 bp, Homo sapiens
tggctctgagcatggtggctcacacctgagatcccagcacttcggaaggccgaggtgggagaattgcttgaggccaggagttcgagaccagcctaggtaaygtaacgagaccttgtccctacaaaaaattaaaagaaaattacccaagtgtattagtccattttcacactgctatgaagaactgcctgagactgggtaatt

SEQ ID NO: 496 - DNA, 201 bp, Homo sapiens
ctagccagcccgcagcggccgaaagtgaccactgttcctggaggatttgcattgctggagaagtgcattctaacagtggaattcaggcggcgagagtcggwcaattcaccgtaccatgtggactccccagtgtggagcagaatctgaggactgacttgctaagaatctctgggcaccctggatagaaccttccctttggct

SEQ ID NO: 497 - DNA, 201 bp, Homo sapiens
ccaactccacagaaacaacacccagcgagcccctcgtgctgctggcggctgagcagaccagtggcagtttctcacagctctcaggaaagccccagctcacrgcagacaggaacaatgacactgccattgaaatagacaactgcagcagctacaagataccctctccagtggcatctccaatcaatttgaatatacccatga

SEQ ID NO: 498 - DNA, 201 bp, Homo sapiens
tctccaactcggtggtgtttgaaagcaactttatccaggtcactaagcccgggaactggagagatgtctgtgaagggtctgccaccgtgatcctcggggtsacctcctcggtgccctccctgccactccccaatgtcctcctgatggccaatgttacctggccccagggtccatttaccacctggagcacacctggtgtcg

SEQ ID NO: 499 - DNA, 201 bp, Homo sapiens
aatgctggggaggtgggggcagatcacatcaacatcctggcattgggctgggtcggcgtggagccccagaaatgttcccaagcccattcttaccaagaacyaatgagtaaaatcaggggcctcccacctgaggtcagggaaccaggccctggagtggaacttggggtggaaaatggccttctttgtcaactgattcattct

SEQ ID NO: 500 - DNA, 201 bp, Homo sapiens
cgagcccctcgtgctgctggcggctgagcagaccagtggcagtttctcacagctctcaggaaagccccagctcacagcagacaggaacaatgacactgccrttgaaatagacaactgcagcagctacaagataccctctccagtggcatctccaatcaatttgaatatacccatgagagctgccttgagccacagcctctg

SEQ ID NO: 501 - DNA, 201 bp, Homo sapiens
gtcacctcctcggtgccctccctgccactccccaatgtcctcctgatggccaatgttacctggccccagggtccatttaccacctggagcacacctggtgwcgccccagtcatcaacctcagcaggcttctccccctgaagtacgtggagctacgaatctacgaccggctccagcgcatcctgagggttaggacagtgacc

SEQ ID NO: 502 - DNA, 153 bp, Homo sapiens
ctcttgaactggggaggcagaggttgcagtgagccgagatcactccactgcgctctagcctgggcaacagagcaagattccatctcaaaaaaaaaaaaaawatatctgactgagtttcctccttaataaaaccagaccctttgacatgaaatg

SEQ ID NO: 503 - DNA, 201 bp, Homo sapiens
ccagggtccatttaccacctggagcacacctggtgtcgccccagtcatcaacctcagcaggcttctccccctgaagtacgtggagctacgaatctacgacyggctccagcgcatcctgagggttaggacagtgaccgaaaagatctactatctgaagctccacgaaaaacacccagagattgtgtttcaattctgggtccg

SEQ ID NO: 504 - DNA, 104 bp, Homo sapiens
ggacccagcctgagatggtcccatctgcagggccccgcaccagttggagcagatgcctccccaccaccaattgccaaaggtccaataaaatgcctcaaccmcgg

SEQ ID NO: 505 - DNA, 201 bp, Homo sapiens
ctgttccttttgctcggtatttggcaatgaataaactgaccaacattaaacgctaccacatagcaaaggtatatcggcgggataacccagccatgacccgwggccgataccgggaattctaccagtgtgattttgacattgctgggaactttgatcccatgatccctgatgcagagtgcctgaagatcatgtgcgagatcc

SEQ ID NO: 506 - DNA, 201 bp, Homo sapiens
ccgcattggggactatgtccagcaacatggtggggtatccctggtggaacagctgctccaggatcctaaactatcccaaaacaagcaggccttggagggcytgggagacctgaagttgctctttgagtacctgaccctatttggcattgatgacaaaatctcctttgacctgagccttgctcgagggctggattactacac

SEQ ID NO: 507 - DNA, 201 bp, Homo sapiens
agagtgcctgaagatcatgtgcgagatcctgagttcacttcagataggcgacttcctggtcaaggtaaacgatcgacgcattctagatgggatgtttgctrtctgtggtgtttctgacagcaagttccgtaccatctgctcctcagtagacaagctggacaaggtgtcctgggaagaggtgaagaatgagatggtgggaga

SEQ ID NO: 508 - DNA, 1 bp, Homo sapiens
y

SEQ ID NO: 509 - DNA, 201 bp, Homo sapiens
gtaccatctgctcctcagtagacaagctggacaaggtgtcctgggaagaggtgaagaatgagatggtgggagagaagggccttgcacctgaggtggctgaycgcattggggactatgtccagcaacatggtggggtatccctggtggaacagctgctccaggatcctaaactatcccaaaacaagcaggccttggagggcc

SEQ ID NO: 510 - DNA, 180 bp, Homo sapiens
caaaaacggccaggtacaacacctttttcatacaaggcccaggaggcttagtccagtctgtgctcctgggctacaaggacccagcctgagatggtcccatytgcagggccccgcaccagttggagcagatgcctccccaccaccaattgccaaaggtccaataaaatgcctcaaccacgg

SEQ ID NO: 511 - DNA, 201 bp, Homo sapiens
gaatgagatggtgggagagaagggccttgcacctgaggtggctgaccgcattggggactatgtccagcaacatggtggggtatccctggtggaacagctgstccaggatcctaaactatcccaaaacaagcaggccttggagggcctgggagacctgaagttgctctttgagtacctgaccctatttggcattgatgacaa

SEQ ID NO: 512 - DNA, 201 bp, Homo sapiens
tgacccgtggccgataccgggaattctaccagtgtgattttgacattgctgggaactttgatcccatgatccctgatgcagagtgcctgaagatcatgtgygagatcctgagttcacttcagataggcgacttcctggtcaaggtaaacgatcgacgcattctagatgggatgtttgctatctgtggtgtttctgacagca

SEQ ID NO: 513 - DNA, 201 bp, Homo sapiens
gccacggtgcagaagtcattgatacacctgtatttgaactaaaggaaacactgatgggaaagtatggggaagactccaagcttatctatgacctgaaggaycagggcggggagctcctgtcccttcgctatgacctcactgttccttttgctcggtatttggcaatgaataaactgaccaacattaaacgctaccacatag

SEQ ID NO: 514 - DNA, 1 bp, Homo sapiens
s

SEQ ID NO: 515 - DNA, 201 bp, Homo sapiens
ctagtgggcatgttcgaccccaaagggcgcaaggtgccatgtgtggggctcagcattggggtggagcggattttctccatcgtggaacagagactagaggytttggaggagaagatacggaccacggagacacaggtgcttgtggcatctgcacagaagaagctgctagaggaaagactaaagcttgtctcagaactgtgg

SEQ ID NO: 516 - DNA, 201 bp, Homo sapiens
gcggattttctccatcgtggaacagagactagaggctttggaggagaagatacggaccacggagacacaggtgcttgtggcatctgcacagaagaagctgstagaggaaagactaaagcttgtctcagaactgtgggatgctgggatcaaggctgagctgctgtacaagaagaacccaaagctactgaaccagttacagta

SEQ ID NO: 517 - DNA, 201 bp, Homo sapiens
acagcaagttccgtaccatctgctcctcagtagacaagctggacaaggtgtcctgggaagaggtgaagaatgagatggtgggagagaagggccttgcaccwgaggtggctgaccgcattggggactatgtccagcaacatggtggggtatccctggtggaacagctgctccaggatcctaaactatcccaaaacaagcagg

SEQ ID NO: 518 - DNA, 201 bp, Homo sapiens
tgtgcgagatcctgagttcacttcagataggcgacttcctggtcaaggtaaacgatcgacgcattctagatgggatgtttgctatctgtggtgtttctgayagcaagttccgtaccatctgctcctcagtagacaagctggacaaggtgtcctgggaagaggtgaagaatgagatggtgggagagaagggccttgcacctg

SEQ ID NO: 519 - DNA, 142 bp, Homo sapiens
ccaggaggcttagtccagtctgtgctcctgggctacaaggacccagcctgagatggtcccatctgcagggccccgcaccagttggagcagatgcctccccmccaccaattgccaaaggtccaataaaatgcctcaaccacgg

SEQ ID NO: 520 - DNA, 201 bp, Homo sapiens
cagagcctttgatttttattatggttattttattgattattactggcaaaaacggccaggtacaacacctttttcatacaaggcccaggaggcttagtccmgtctgtgctcctgggctacaaggacccagcctgagatggtcccatctgcagggccccgcaccagttggagcagatgcctccccaccaccaattgccaaag

SEQ ID NO: 521 - DNA, 201 bp, Homo sapiens
cattgatacacctgtatttgaactaaaggaaacactgatgggaaagtatggggaagactccaagcttatctatgacctgaaggaccagggcggggagctcwtgtcccttcgctatgacctcactgttccttttgctcggtatttggcaatgaataaactgaccaacattaaacgctaccacatagcaaaggtatatcggcg

SEQ ID NO: 522 - DNA, 201 bp, Homo sapiens
ggtgtttctgacagcaagttccgtaccatctgctcctcagtagacaagctggacaaggtgtcctgggaagaggtgaagaatgagatggtgggagagaaggyccttgcacctgaggtggctgaccgcattggggactatgtccagcaacatggtggggtatccctggtggaacagctgctccaggatcctaaactatcccaa

SEQ ID NO: 523 - DNA, 201 bp, Homo sapiens
cgctaccacatagcaaaggtatatcggcgggataacccagccatgacccgtggccgataccgggaattctaccagtgtgattttgacattgctgggaactrtgatcccatgatccctgatgcagagtgcctgaagatcatgtgcgagatcctgagttcacttcagataggcgacttcctggtcaaggtaaacgatcgacgc

SEQ ID NO: 524 - DNA, 1 bp, Homo sapiens
y

SEQ ID NO: 525 - DNA, 201 bp, Homo sapiens
cctgaagatcatgtgcgagatcctgagttcacttcagataggcgacttcctggtcaaggtaaacgatcgacgcattctagatgggatgtttgctatctgtygtgtttctgacagcaagttccgtaccatctgctcctcagtagacaagctggacaaggtgtcctgggaagaggtgaagaatgagatggtgggagagaaggg

SEQ ID NO: 526 - DNA, 201 bp, Homo sapiens
ttaagacaaactgcatatgtacttcaattgctttgcacttttccgtttcagcggaagacctgaagagtggtcagaacagagcctttgatttttattatggytattttattgattattactggcaaaaacggccaggtacaacacctttttcatacaaggcccaggaggcttagtccagtctgtgctcctgggctacaagga

SEQ ID NO: 527 - DNA, 201 bp, Homo sapiens
aaggtaaacgatcgacgcattctagatgggatgtttgctatctgtggtgtttctgacagcaagttccgtaccatctgctcctcagtagacaagctggacasggtgtcctgggaagaggtgaagaatgagatggtgggagagaagggccttgcacctgaggtggctgaccgcattggggactatgtccagcaacatggtggg

SEQ ID NO: 528 - DNA, 201 bp, Homo sapiens
ggagctcctgtcccttcgctatgacctcactgttccttttgctcggtatttggcaatgaataaactgaccaacattaaacgctaccacatagcaaaggtayatcggcgggataacccagccatgacccgtggccgataccgggaattctaccagtgtgattttgacattgctgggaactttgatcccatgatccctgatgc

SEQ ID NO: 529 - DNA, 201 bp, Homo sapiens
ccgaagtgctgggattacaggcgtgagccactgtgcctggcctcagggcacaagagactatagtccccggcagatggcagttcgcgagaaggtgtttgacytaatcatccgttgcttcaagcgccacggtgcagaagtcattgatacacctgtatttgaactaaaggaaacactgatgggaaagtatggggaagactccaa

SEQ ID NO: 530 - DNA, 84 bp, Homo sapiens
catctgcagggccccgcaccagttggagcagatgcctccccaccaccaattgccaaaggtccaataaaatgcctcaaccacggs

SEQ ID NO: 531 - DNA, 201 bp, Homo sapiens
ctcgagggctggattactacactggggtgatctatgaggcagtgctgctacagaccccagcccaggcaggggaagagcccctgggtgtgggcagtgtggcygctggaggacgctatgatgggctagtgggcatgttcgaccccaaagggcgcaaggtgccatgtgtggggctcagcattggggtggagcggattttctcca

SEQ ID NO: 532 - DNA, 201 bp, Homo sapiens
gcaggggaagagcccctgggtgtgggcagtgtggctgctggaggacgctatgatgggctagtgggcatgttcgaccccaaagggcgcaaggtgccatgtgsggggctcagcattggggtggagcggattttctccatcgtggaacagagactagaggctttggaggagaagatacggaccacggagacacaggtgcttgtg

SEQ ID NO: 533 - DNA, 201 bp, Homo sapiens
tgatgcagagtgcctgaagatcatgtgcgagatcctgagttcacttcagataggcgacttcctggtcaaggtaaacgatcgacgcattctagatgggatgwttgctatctgtggtgtttctgacagcaagttccgtaccatctgctcctcagtagacaagctggacaaggtgtcctgggaagaggtgaagaatgagatggt

SEQ ID NO: 534 - DNA, 201 bp, Homo sapiens
ggtatatcggcgggataacccagccatgacccgtggccgataccgggaattctaccagtgtgattttgacattgctgggaactttgatcccatgatccctyatgcagagtgcctgaagatcatgtgcgagatcctgagttcacttcagataggcgacttcctggtcaaggtaaacgatcgacgcattctagatgggatgtt

SEQ ID NO: 535 - DNA, 201 bp, Homo sapiens
ttttccgtttcagcggaagacctgaagagtggtcagaacagagcctttgatttttattatggttattttattgattattactggcaaaaacggccaggtamaacacctttttcatacaaggcccaggaggcttagtccagtctgtgctcctgggctacaaggacccagcctgagatggtcccatctgcagggccccgcacc

SEQ ID NO: 536 - DNA, 201 bp, Homo sapiens
gaacctcagtctggggacctgacctctgtcactctcatgaaagtacagctggttatgtgggggaagaaggtagcctgtggctccagtgaaggtaccatctrcctcttcaattggaatggctttggggccacaagtgaccgctttgccctgagagctgaatctatcgactgcatggttccagtcaccgagagtctgctgtgt

SEQ ID NO: 537 - DNA, 201 bp, Homo sapiens
actggaaagacgtgtttccaaggctcatggtgcccccatcaatagtcttctgctggtggatgagaatgttctggccactggggatgacacaggtggtatcygtctctgggaccagcggaaggagggccccttaatggatatgaggcaacatgaagagtacatcgcagacatggctctggatccagccaaaaagctgctgct

SEQ ID NO: 538 - DNA, 201 bp, Homo sapiens
ggtcctcaccagggtgcctgtggagaaagaatggagtcactgtttaaccatggtacctgcctcagccccagcagaccacaggaggttggccccagactcamtgagtgcctgcagcagccgtacagacacagcatccttggccacctcatgcccatcccggccatctagggtcagcacaacccagatgaggccgctgaaggg

SEQ ID NO: 539 - DNA, 201 bp, Homo sapiens
gtgaaggtaccatctacctcttcaattggaatggctttggggccacaagtgaccgctttgccctgagagctgaatctatcgactgcatggttccagtcacmgagagtctgctgtgtactggctccactgatggagtcatcagggctgtgaacatcctaccgaaccgagtggtgggcagtgtgggccagcacactggggagc

SEQ ID NO: 540 - DNA, 141 bp, Homo sapiens
agttttaaaaatctgagatcaaatagtaaaaggttgcaaattctggcatgtttgactctaagatcttgtaactttaacagctatgctcagtataaagtgcygggcagaacgcgtttggccccaaccagcacccccgcccca

SEQ ID NO: 541 - DNA, 201 bp, Homo sapiens
agctcattactgtctccaaggacaaagccatccatgttctagatgtggagcagggccaactggaaagacgtgtttccaaggctcatggtgcccccatcaayagtcttctgctggtggatgagaatgttctggccactggggatgacacaggtggtatccgtctctgggaccagcggaaggagggccccttaatggatatga

SEQ ID NO: 542 - DNA, 201 bp, Homo sapiens
ccatgaccagcgcctcaagttttgggacatggcccagctgcgagctgtggtggtggatgactaccgtcggcgcaaaaaaaagggaggaccactgcgggctytgagcagcaagacttggagcaccgatgacttcttcgcaggactgagggaagagggagaagactccatggctcaggaagaaaaggaggagactggggatga

SEQ ID NO: 543 - DNA, 157 bp, Homo sapiens
cggagtgccaggctactcctcccgcagtgtgggtggttccgaggctgactaccctgmggcggcgcggctcgcagtccttctcagcatggaccgcacttgtgaggagaggcccgctgaggatgggagcgacgaggaggacccagactccatggaagcc

SEQ ID NO: 544 - DNA, 201 bp, Homo sapiens
gatccagccaaaaagctgctgctgacagccagcggggatggctgccttggcatcttcaacattaagaggcgtcggtttgagctgctctcagaacctcagtytggggacctgacctctgtcactctcatgaaagtacagctggttatgtgggggaagaaggtagcctgtggctccagtgaaggtaccatctacctcttcaat

SEQ ID NO: 545 - DNA, 201 bp, Homo sapiens
cccagctgcgagctgtggtggtggatgactaccgtcggcgcaaaaaaaagggaggaccactgcgggctctgagcagcaagacttggagcaccgatgacttyttcgcaggactgagggaagagggagaagactccatggctcaggaagaaaaggaggagactggggatgacagtgactgaaggaatgaattgaatcttgaga

SEQ ID NO: 546 - DNA, 201 bp, Homo sapiens
tggtggtggatgactaccgtcggcgcaaaaaaaagggaggaccactgcgggctctgagcagcaagacttggagcaccgatgacttcttcgcaggactgagrgaagagggagaagactccatggctcaggaagaaaaggaggagactggggatgacagtgactgaaggaatgaattgaatcttgagacgggtcctcaccagg

SEQ ID NO: 547 - DNA, 201 bp, Homo sapiens
ttcgcaggactgagggaagagggagaagactccatggctcaggaagaaaaggaggagactggggatgacagtgactgaaggaatgaattgaatcttgagaygggtcctcaccagggtgcctgtggagaaagaatggagtcactgtttaaccatggtacctgcctcagccccagcagaccacaggaggttggccccagactc

SEQ ID NO: 548 - DNA, 201 bp, Homo sapiens
ggaggacccagactccatggaagccccaacccggatccgggacactccggaagacatcgtgctggaagctccggctagtgggctggcgttccatccggccygtgacctactggctgcaggggacgtggacggggacgtgttcgtcttttcctactcttgccaagagggagaaaccaaggagctctggtcatcaggtcacca

SEQ ID NO: 549 - DNA, 168 bp, Homo sapiens
cggagtgccaggctactcctcccgcagtgtgggtggttccgaggctgactaccctgcggcggcgcggytcgcagtccttctcagcatggaccgcacttgtgaggagaggcccgctgaggatgggagcgacgaggaggacccagactccatggaagccccaacccggat

SEQ ID NO: 550 - DNA, 201 bp, Homo sapiens
acctcagggtcacaagtttactgtttttctcccttttccatccctacattggtctgctggggaaggcggggctaggcatcactgacacacgcagactccgkggttgaggcattttattggacctttggcaattggtggtggggaggcatctgctccaactggtgcggggccctgcagatgggaccatctcaggctgggtcc

SEQ ID NO: 551 - DNA, 201 bp, Homo sapiens
gcagcgcgctgcgggtcagattcggcggcaggccgtcaacgctcagctcacacttctcggtgctgcggcacacgagcagcgggcaggacggccgcagcggrtggttgtgcagcgtggcgatggcggcctgcgcgccgcgcctcgagctgtagcgggcataggcgaagccgcggttcaggccgctgaaggtcatcatcaggc

SEQ ID NO: 552 - DNA, 201 bp, Homo sapiens; identical to SEQ ID NO: 537

SEQ ID NO: 553 - DNA, 201 bp, Homo sapiens
catcactgacacacgcagactccgtggttgaggcattttattggacctttggcaattggtggtggggaggcatctgctccaactggtgcggggccctgcaratgggaccatctcaggctgggtccttgtagcccaggagcacagactggactaagcctcctgggccttgtatgaaaaaggtgttgtacctggccgtttttg

SEQ ID NO: 554 - DNA, 201 bp, Homo sapiens
aggaggagactggggatgacagtgactgaaggaatgaattgaatcttgagacgggtcctcaccagccccagcagaccacaggaggttggccccagactcamtgagtgcctgcagcagccgtacagacacagcatccttggccacctcatgcccatcccggccatctagggtcagcacaacccagatgaggccgctgaaggg

SEQ ID NO: 555 - DNA, 201 bp, Homo sapiens; identical to SEQ ID NO: 539

SEQ ID NO: 556 - DNA, 201 bp, Homo sapiens
tgaagggcaccggatgcccaggaatcaccacctggtaccagaagcggtgccagccagcaggtcctatgcccaaacacttgctatgctcagtataaagtgcygggcagaacgcgtttggccccaaccagcacccccgccccagcctaccttccaccagggcctttttggccatggcagcggcccggtgcgagctgaatttga

SEQ ID NO: 557 - DNA, 201 bp, Homo sapiens; identical to SEQ ID NO: 541

SEQ ID NO: 558 - DNA, 201 bp, Homo sapiens; identical to SEQ ID NO: 542

SEQ ID NO: 559 - DNA, 201 bp, Homo sapiens
ttcgcaggactgagggaagagggagaagactccatggctcaggaagaaaaggaggagactggggatgacagtgactgaaggaatgaattgaatcttgagaygggtcctcaccagccccagcagaccacaggaggttggccccagactcactgagtgcctgcagcagccgtacagacacagcatccttggccacctcatgcc

SEQ ID NO: 560 - DNA, 201 bp, Homo sapiens
tttgagctgctctcagaacctcagtctggggacctgacctctgtcactctcatgaaatgggggaagaaggtagcctgtggctccagtgaaggtaccatctrcctcttcaattggaatggctttggggccacaagtgaccgctttgccctgagagctgaatctatcgactgcatggttccagtcaccgagagtctgctgtgt

SEQ ID NO: 561 - DNA, 201 bp, Homo sapiens
gggtggaggtatccactgcacgtgcgccgcccgggcttcgctcagaccttcaggtgaaagctgcaaagtcgcgggtgcgtatgtacgggggctgcctcccsaggaggagctcccaagccgcagggtggacgctggagacaagaacctcagggtcacaagtttactgtttttctcccttttccatccctacattggtctgct

SEQ ID NO: 562 - DNA, 201 bp, Homo sapiens
gatccagccaaaaagctgctgctgacagccagcggggatggctgccttggcatcttcaacattaagaggcgtcggtttgagctgctctcagaacctcagtytggggacctgacctctgtcactctcatgaaatgggggaagaaggtagcctgtggctccagtgaaggtaccatctacctcttcaattggaatggctttggg

SEQ ID NO: 563 - DNA, 201 bp, Homo sapiens; identical to SEQ ID NO: 545

SEQ ID NO: 564 - DNA, 201 bp, Homo sapiens
tggtggtggatgactaccgtcggcgcaaaaaaaagggaggaccactgcgggctctgagcagcaagacttggagcaccgatgacttcttcgcaggactgagrgaagagggagaagactccatggctcaggaagaaaaggaggagactggggatgacagtgactgaaggaatgaattgaatcttgagacgggtcctcaccagc

SEQ ID NO: 565 - DNA, 201 bp, Homo sapiens
catccctacattggtctgctggggaaggcggggctaggcatcactgacacacgcagactccgtggttgaggcattttattggacctttggcaattggtggkggggaggcatctgctccaactggtgcggggccctgcagatgggaccatctcaggctgggtccttgtagcccaggagcacagactggactaagcctcctgg

SEQ ID NO: 566 - DNA, 201 bp, Homo sapiens
tgtgctgggggcttagtctgaggcagcttccacattgttttctctatttccctgcagtgggggaagaaggtagcctgtggctccagtgaaggtaccatctrcctcttcaattggaatggctttggggccacaagtgaccgctttgccctgagagctgaatctatcgactgcatggttccagtcaccgagagtctgctgtgt

SEQ ID NO: 567 - DNA, 201 bp, Homo sapiens; identical to SEQ ID NO: 537

SEQ ID NO: 568 - DNA, 201 bp, Homo sapiens; identical to SEQ ID NO: 538

SEQ ID NO: 569 - DNA, 201 bp, Homo sapiens; identical to SEQ ID NO: 539

SEQ ID NO: 570 - DNA, 141 bp, Homo sapiens; identical to SEQ ID NO: 540

SEQ ID NO: 571 - DNA, 201 bp, Homo sapiens; identical to SEQ ID NO: 541

SEQ ID NO: 572 - DNA, 201 bp, Homo sapiens; identical to SEQ ID NO: 542

SEQ ID NO: 573 - DNA, 157 bp, Homo sapiens; identical to SEQ ID NO: 543

SEQ ID NO: 574 - DNA, 201 bp, Homo sapiens
gatccagccaaaaagctgctgctgacagccagcggggatggctgccttggcatcttcaacattaagaggcgtcggtttgagctgctctcagaacctcagtytggggacctgacctctgtcactctcatgaaagtacagctggttatggtgggatggaggggtgtgtgctgggggcttagtctgaggcagcttccacattgt

SEQ ID NO: 575 - DNA, 201 bp, Homo sapiens; identical to SEQ ID NO: 545

SEQ ID NO: 576 - DNA, 201 bp, Homo sapiens; identical to SEQ ID NO: 546

SEQ ID NO: 577 - DNA, 201 bp, Homo sapiens; identical to SEQ ID NO: 547

SEQ ID NO: 578 - DNA, 201 bp, Homo sapiens; identical to SEQ ID NO: 548

SEQ ID NO: 579 - DNA, 168 bp, Homo sapiens; identical to SEQ ID NO: 549

SEQ ID NO: 580 - DNA, 201 bp, Homo sapiens
caatttccaaaggttgcaagatgtttttttgtggatgaatataaaattttattgtgtaattacttggttccattaaaattggttaacttgctattttcttkgttgagcatgtcccctccagtgcccttgaagcaccaagaacactaattccactggttgtgtaaaatcacatgcagaaagtcatcagtcctttcctgagct

SEQ ID NO: 581 - DNA, 201 bp, Homo sapiens
ctgaggcagggaacccgtaacaagaagcttaagaagaaggataaagggaagctggaagagaagaaacctcctgaggctgacatgaatatttttgaagacaytggggattacgtaccctccacaaccaagacacctcgggacaaggagcgggagagatatcgggaacgggagcgtgatcgggaaagagacagagaccgtgac

SEQ ID NO: 582 - DNA, 201 bp, Homo sapiens
gaagaggaagaagatggaagctgatggggttgaagtcaaaagaccaaaatactaatcactagttacaaccagagatgctccacaaggatatgctccccackgttttctttctacaatttccaaaggttgcaagatgtttttttgtggatgaatataaaattttattgtgtaattacttggttccattaaaattggttaact

SEQ ID NO: 583 - DNA, 201 bp, Homo sapiens
agaggaagaagatggaagctgatggggttgaagtcaaaagaccaaaatactaatcactagttacaaccagagatgctccacaaggatatgctccccactgwtttctttctacaatttccaaaggttgcaagatgtttttttgtggatgaatataaaattttattgtgtaattacttggttccattaaaattggttaacttg

SEQ ID NO: 584 - DNA, 166 bp, Homo sapiens
aacgcaaagcagtgtgggttgattctgaggtgcactgtgggaaagagcttgtcgctgcggtgttgytgttggagactcgattgttggtgacagcgaaagaacgataacaaaatgccggagcgagatagtgagccgttctccaaccctttggcccccgatggccacg

SEQ ID NO: 585 - DNA, 201 bp, Homo sapiens
attgtcattagcaagctgacccagatcctttcatacctgaggcagggaacccgtaacaagaagcttaagaagaaggataaagggaagctggaagagaagaracctcctgaggctgacatgaatatttttgaagacattggggattacgtaccctccacaaccaagacacctcgggacaaggagcgggagagatatcgggaa

SEQ ID NO: 586 - DNA, 201 bp, Homo sapiens
cattccagtatggtatcaaaatgtctgaagggcggaaaaccaggcgcttcaaggaaaccaatgacaaagcagagcttgatcgccagtggaagaagattagygcaatcattgagaagaggaagaagatggaagctgatggggttgaagtcaaaagaccaaaatactaatcactagttacaaccagagatgctccacaaggat

SEQ ID NO: 587 - DNA, 201 bp, Homo sapiens; identical to SEQ ID NO: 580

SEQ ID NO: 588 - DNA, 201 bp, Homo sapiens; identical to SEQ ID NO: 581

SEQ ID NO: 589 - DNA, 201 bp, Homo sapiens; identical to SEQ ID NO: 582

SEQ ID NO: 590 - DNA, 201 bp, Homo sapiens; identical to SEQ ID NO: 583

SEQ ID NO: 591 - DNA, 166 bp, Homo sapiens; identical to SEQ ID NO: 584

SEQ ID NO: 592 - DNA, 201 bp, Homo sapiens; identical to SEQ ID NO: 585

SEQ ID NO: 593 - DNA, 201 bp, Homo sapiens; identical to SEQ ID NO: 586

SEQ ID NO: 594 - DNA, 201 bp, Homo sapiens; identical to SEQ ID NO: 580

SEQ ID NO: 595 - DNA, 201 bp, Homo sapiens; identical to SEQ ID NO: 581

SEQ ID NO: 596 - DNA, 201 bp, Homo sapiens; identical to SEQ ID NO: 582

SEQ ID NO: 597 - DNA, 201 bp, Homo sapiens; identical to SEQ ID NO: 583

SEQ ID NO: 598 - DNA, 166 bp, Homo sapiens; identical to SEQ ID NO: 584

SEQ ID NO: 599 - DNA, 201 bp, Homo sapiens; identical to SEQ ID NO: 585

SEQ ID NO: 600 - DNA, 201 bp, Homo sapiens
aacgagatcgggaacgagagcgagagcgggaccgagagagagaagaggaaaagaagagacacagctactttgagaagccaaaagtagatgatgaggtgagytaggacctgggtctaccaaggagttgatcaagtccatcaatgaaaagtttgctgggtctgctggctgggaaggcacacatatgctgaagaagccagaaga

SEQ ID NO: 601 - DNA, 201 bp, Homo sapiens
gaaatattagtaagttggtttttagctctgcattatctagccatatttgtgtctggaacaggattaagaattatgatttttagctggatagtttctaatcrcttcaatctctggcttgctacaatcttcagcatcttttatttgctcaaaatagcgagtttctctagccctgcttttctctatttgaagtggagagtaaac

SEQ ID NO: 602 - DNA, 201 bp, Homo sapiens
gtccatacaaatgccttgaaaattgtgatctcattccttttattctatgctagtttctttctatgtgttctcatatcatggatttctgagctgtatcagarcacagtgatctacatgctttgtgagacgattggagtcttctctccttcaagccactcctttcttctgattctaggaaacgctaagttaagacaggccttt

SEQ ID NO: 603 - DNA, 201 bp, Homo sapiens
tgtagaagtcagaactttcttgagcgaaaaatatatctgcagggttcgggtgagcccaggtgttgcttgttcaatatcccaagcccagaaagatgagttcrtccttaaaggaaatgacattgaacttgtttcaaattcagctgctttgactcagcaaaccacaacagctaaaaaccaggatatcagaacattttggatggt

SEQ ID NO: 604 - DNA, 201 bp, Homo sapiens
gacagttcagcaggctgatgagtaaaatctaagagttgtacagctacagaaacaagatgtcagataattcctaagacctatttgtgatattttaataatgyaataaaagacagctattgaaaaataaagtagtgatgaggtttcaagacatgaatgatgggatttgctgatggctagcactcaggatgtaagggaaagaga

SEQ ID NO: 605 - DNA, 201 bp, Homo sapiens
cagaagatgatcaagggcgttatactgggcttctgtgacaagatgaggtctctgtgttctcacttccccatcaatgtcattatgcaggagaatagctctaytgtagaagtcagaactttcttgagcgaaaaatatatctgcagggttcgggtgagcccaggtgttgcttgttcaatatcccaagcccagaaagatgagttc

SEQ ID NO: 606 - DNA, 201 bp, Homo sapiens
tactccaccactgtcacaggaagaacttgccaagcttggtcatctatgacaccacaccagcatagtcggaccccagaaaactacccaaatgctggcctgascaggaactactgcaggaatccagatgctgagattcgcccttggtgttacaccatggatcccagtgtcaggtgggagtactgcaacctgacacaatgcctg

SEQ ID NO: 607 - DNA, 201 bp, Homo sapiens
tgtttgggaatgggaaaggataccggggcaagaaggcaaccactgttactgggacgccatgccaggaatgggctgcccaggagccccatagacacagcacrttcattccagggacaaataaatgggcaggtctggaaaaaaattactgccgtaaccctgatggtgacatcaatggtccctggtgctacacaatgaatccaa

SEQ ID NO: 608 - DNA, 201 bp, Homo sapiens
caccggcatcagaggaccccagaaaactacccaaatgatggcctgacaatgaactactgcaggaatccagatgccgatacaggcccttggtgttttaccayggaccccagcatcaggtgggagtactgcaacctgacgcgatgctcagacacagaagggactgtggtcgctcctccgactgtcatccaggttccaagccta

SEQ ID NO: 609 - DNA, 201 bp, Homo sapiens
agggcctccttctgaacaagactgtatgtttgggaatgggaaaggataccggggcaagaaggcaaccactgttactgggacgccatgccaggaatgggctkcccaggagccccatagacacagcacgttcattccagggacaaataaatgggcaggtctggaaaaaaattactgccgtaaccctgatggtgacatcaatgg

SEQ ID NO: 610 - DNA, 201 bp, Homo sapiens
cactgacagttgccagggtgacagtggagggcctctggtttgcttcgagaaggacaaatacattttacaaggagtcacttcttggggtcttggctgtgcaygccccaataagcctggtgtctatgctcgtgtttcaaggtttgttacttggattgagggaatgatgagaaataattaattggacgggagacagagtgaagc

SEQ ID NO: 611 - DNA, 201 bp, Homo sapiens
ggattgctaccatggtgatggacggagttatcgaggcatatcctccaccactgtcacaggaaggacctgtcaatcttggtcatctatgataccacactggyatcagaggaccccagaaaactacccaaatgctggcctgaccgagaactactgcaggaatccagattctgggaaacaaccctggtgttacacaaccgatcc

SEQ ID NO: 612 - DNA, 201 bp, Homo sapiens
gaatccagatgctgagattcgcccttggtgttataccatggatcccagtgtcagatgggagtactgcaacctgacgcaatgtccagtgatggaatcaactstcctcacaactcccacggtggtcccagttccaagcacagagcttccttctgaagaagcaccaactgaaaacagcactggggtccaggactgctaccgagg

SEQ ID NO: 613 - DNA, 201 bp, Homo sapiens
agtactgcaacctgacgcgatgctcagacacagaagggactgtggtcgctcctccgactgtcatccaggttccaagcctagggcctccttctgaacaagaytgtatgtttgggaatgggaaaggataccggggcaagaaggcaaccactgttactgggacgccatgccaggaatgggctgcccaggagccccatagacaca

SEQ ID NO: 614 - DNA, 201 bp, Homo sapiens
cccagttccaagcacagagcttccttctgaagaagcaccaactgaaaacagcactggggtccaggactgctaccgaggtgatggacagagttatcgaggcmcactctccaccactatcacaggaagaacatgtcagtcttggtcgtctatgacaccacattggcatcggaggatcccattatactatccaaatgctggcct

SEQ ID NO: 615 - DNA, 201 bp, Homo sapiens
gtggcctgaccaggaactactgcaggaatccagatgctgagattcgcccttggtgttataccatggatcccagtgtcagatgggagtactgcaacctgacrcaatgtccagtgatggaatcaactctcctcacaactcccacggtggtcccagttccaagcacagagcttccttctgaagaagcaccaactgaaaacagca

SEQ ID NO: 616 - DNA, 201 bp, Homo sapiens
gagcaaagccccggggtccaggattgctaccatggtgatggacagagttatcgaggctcattctctaccactgtcacaggaaggacatgtcagtcttggtyctctatgacaccacactggcatcagaggacaacagaatattatccaaatggtggcctgaccaggaactactgcaggaatccagatgctgagattagtcct

SEQ ID NO: 617 - DNA, 201 bp, Homo sapiens
cacaactcccacggtggtcccagttccaagcacagagcttccttctgaagaagcaccaactgaaaacagcactggggtccaggactgctaccgaggtgatrgacagagttatcgaggcacactctccaccactatcacaggaagaacatgtcagtcttggtcgtctatgacaccacattggcatcggaggatcccattata

SEQ ID NO: 618 - DNA, 201 bp, Homo sapiens
aactcccacagtggccccggttccaagcacagaggctccttctgaacaagcaccacctgagaaaagccctgtggtccaggattgctaccatggtgatggayggagttatcgaggcatatcctccaccactgtcacaggaaggacctgtcaatcttggtcatctatgataccacactggcatcagaggaccccagaaaacta

SEQ ID NO: 619 - DNA, 201 bp, Homo sapiens
ctttttgactactgtgatatccctctctgtgcatcctcttcatttgattgtgggaagcctcaagtggagccgaagaaatgtcctggaagcattgtaggggkgtgtgtggcccacccacattcctggccctggcaagtcagtctcagaacaaggtttggaaagcacttctgtggaggcaccttaatatccccagagtgggtg

SEQ ID NO: 620 - DNA, 201 bp, Homo sapiens
cgaggcacactctccaccactatcacaggaagaacatgtcagtcttggtcgtctatgacaccacattggcatcggaggatcccattatactatccaaatgrtggcctgaccaggaactactgcaggaatccagatgctgagattcgcccttggtgttacaccatggatcccagtgtcaggtgggagtactgcaacctgaca

SEQ ID NO: 621 - DNA, 201 bp, Homo sapiens
aaactttttgactactgtgatatccctctctgtgcatcctcttcatttgattgtgggaagcctcaagtggagccgaagaaatgtcctggaagcattgtagsggggtgtgtggcccacccacattcctggccctggcaagtcagtctcagaacaaggtttggaaagcacttctgtggaggcaccttaatatccccagagtgg

SEQ ID NO: 622 - DNA, 201 bp, Homo sapiens
gttacaccatggatcccagtgtcaggtgggagtactgcaacctgacacaatgcctggtgacagaatcaagtgtccttgcaactctcacggtggtcccagayccaagcacagaggcttcttctgaagaagcaccaacggagcaaagccccggggtccaggattgctaccatggtgatggacagagttatcgaggctcattct

SEQ ID NO: 623 - DNA, 201 bp, Homo sapiens
ctgtggtcgctcctccgactgtcatccaggttccaagcctagggcctccttctgaacaagactgtatgtttgggaatgggaaaggataccggggcaagaargcaaccactgttactgggacgccatgccaggaatgggctgcccaggagccccatagacacagcacgttcattccagggacaaataaatgggcaggtctgg

SEQ ID NO: 624 - DNA, 201 bp, Homo sapiens
ccacagtccaggactgctaccatggtgatggacagagttatcgaggctcattctccaccactgttacaggaaggacatgtcagtcttggtcctctatgacmccacactggcatcagagaaccacagaatactacccaaatggtggcctgaccaggaactactgcaggaatccagatgctgagattcgcccttggtgttata

SEQ ID NO: 625 - DNA, 201 bp, Homo sapiens
accgatccgtgtgtgaggtgggagtactgcaatctgacacaatgctcagaaacagaatcaggtgtcctagagactcccactgttgttccagttccaagcayggaggctcattctgaagcagcaccaactgagcaaacccctgtggtccggcagtgctaccatggtaatggccagagttatcgaggcacattctccaccact

SEQ ID NO: 626 - DNA, 201 bp, Homo sapiens
tcccagtgtcagatgggagtactgcaacctgacgcaatgtccagtgatggaatcaactctcctcacaactcccacggtggtcccagttccaagcacagagsttccttctgaagaagcaccaactgaaaacagcactggggtccaggactgctaccgaggtgatggacagagttatcgaggcacactctccaccactatcac

SEQ ID NO: 627 - DNA, 201 bp, Homo sapiens
ctgctgctcactgcttgaagaagtcctcaaggccttcatcctacaaggtcatcctgggtgcacaccaagaagtgaacctcgaatctcatgttcaggaaatrgaagtgtctaggctgttcttggagcccacacaagcagatattgccttgctaaagctaagcaggcctgccgtcatcactgacaaagtaatgccagcttgtc

SEQ ID NO: 628 - DNA, 201 bp, Homo sapiens
aaagtcatcggccactggaccaatcagcttcatctaaaagtggaagacatgcagtgggctcatagagaacatactcacccggcgtctgtctgcagcctgcygtgtaagccaggggagaggaagaaaacggtgaaaggggtcccttgctgctggcactgtgaacgctgtgaaggttacaactaccaggtggatgagctgtcc

SEQ ID NO: 629 - DNA, 201 bp, Homo sapiens
aaggccaggggagtgctcaagtgtgacatttctgatctctcactcatttgttcacttggatacagtatcctcttgatggtcacttgtactgtttatgccawtaaaacgagaggtgtcccagagactttcaatgaagccaaacctattggatttaccatgtataccacctgcatcatttggttagctttcatccccatcttt

SEQ ID NO: 630 - DNA, 201 bp, Homo sapiens
gcctgctagaaacacctaatgctcgagcagtgattatgtttgccaatgaggatgacatcaggaggatattggaagcagcaaaaaaactaaaccaaagtggscattttctctggattggctcagatagttggggatccaaaatagcacctgtctatcagcaagaggagattgcagaaggggctgtgacaattttgcccaaac

SEQ ID NO: 631 - DNA, 201 bp, Homo sapiens
gtctgcagcctgccgtgtaagccaggggagaggaagaaaacggtgaaaggggtcccttgctgctggcactgtgaacgctgtgaaggttacaactaccaggkggatgagctgtcctgtgaactttgccctctggatcagagacccaacatgaaccgcacaggctgccagcttatccccatcatcaaattggagtggcattct

SEQ ID NO: 632 - DNA, 201 bp, Homo sapiens
cgcccaagttcattagtccagcatctcagctggtgatcaccttcagcctcatctccgtccagctccttggagtgtttgtctggtttgttgtggatcccccscacatcatcattgactatggagagcagcggacactagatccagagaaggccaggggagtgctcaagtgtgacatttctgatctctcactcatttgttcac

SEQ ID NO: 633 - DNA, 201 bp, Homo sapiens
ctgatccaaaaaggaaatgacagaccaaatggcgaggtgaaaagtgaactctgtgagagtcttgaaaccaacacttcctctaccaagacaacatatatcakttacagcaatcattcaatctgaaacagggaaatggcacaatctgaagagatgtggtatatgatcttaaatgatgaacatgagaccgcaaaaattcactcc

SEQ ID NO: 634 - DNA, 201 bp, Homo sapiens
tgtataccacctgcatcatttggttagctttcatccccatcttttttggtacagcccagtcagcagaaaagatgtacatccagacaacaacacttactgtytccatgagtttaagtgcttcagtatctctgggcatgctctatatgcccaaggtttatattataatttttcatccagaacagaatgttcaaaaacgcaaga

SEQ ID NO: 635 - DNA, 201 bp, Homo sapiens
aacggtgaaaggggtcccttgctgctggcactgtgaacgctgtgaaggttacaactaccaggtggatgagctgtcctgtgaactttgccctctggatcagmgacccaacatgaaccgcacaggctgccagcttatccccatcatcaaattggagtggcattctccctgggctgtggtgcctgtgtttgttgcaatattggg

SEQ ID NO: 636 - DNA, 201 bp, Homo sapiens
aactttgggtcttggattgcaataccacctgtggagaaaatggtatgcgagggaaagcgatcagcctcttgcccttgtttcttcctcttgaccgccaagtkctactggatcctcacaatgatgcaaagaactcacagccaggagtatgcccattccatacgggtggatggggacattattttggggggtctcttccctgtc

SEQ ID NO: 637 - DNA, 201 bp, Homo sapiens
aaccaacaaaagcacagagtacaaagtcatcggccactggaccaatcagcttcatctaaaagtggaagacatgcagtgggctcatagagaacatactcacscggcgtctgtctgcagcctgccgtgtaagccaggggagaggaagaaaacggtgaaaggggtcccttgctgctggcactgtgaacgctgtgaaggttacaa

SEQ ID NO: 638 - DNA, 184 bp, Homo sapiens
ttctgtggcaagaataaactttgggtcttggattgcaataccacctgtggagaaaatggtatgcgagggaaagcgatcagcctsttgcccttgtttcttcctcttgaccgccaagttctactggatcctcacaatgatgcaaagaactcacagccaggagtatgcccattccatacgggtggat

SEQ ID NO: 639 - DNA, 201 bp, Homo sapiens
ctgactcctaccaagcccaagccatggtggacatcgtgacagcactgggatggaattatgtttcgacactggcttctgaggggaactatggtgagagcggygtggaggccttcacccagatctcgagggagattggtggtgtttgcattgctcagtcacagaaaatcccacgtgaaccaagacctggagaatttgaaaaaa

SEQ ID NO: 640 - DNA, 201 bp, Homo sapiens
ttaacaaggaccctgatctcctttccaacatcactctgggtgtccgcatcctcgacacgtgctctagggacacctatgctttggagcagtctctaacattygtgcaggcattaatagagaaagatgcttcggatgtgaagtgtgctaatggagatccacccattttcaccaagcccgacaagatttctggcgtcataggtg

SEQ ID NO: 641 - DNA, 201 bp, Homo sapiens
ctggcactcctgtcacttttaatgaaaacggagatgctcctggacgttatgatatcttccagtatcaaataaccaacaaaagcacagagtacaaagtcatyggccactggaccaatcagcttcatctaaaagtggaagacatgcagtgggctcatagagaacatactcacccggcgtctgtctgcagcctgccgtgtaagc

SEQ ID NO: 642 - DNA, 201 bp, Homo sapiens
agagaaagatgcttcggatgtgaagtgtgctaatggagatccacccattttcaccaagcccgacaagatttctggcgtcataggtgctgcagcaagctccrtgtccatcatggttgctaacattttaagactttttaagatacctcaaatcagctatgcatccacagccccagagctaagtgataacaccaggtatgactt

SEQ ID NO: 643 - DNA, 201 bp, Homo sapiens
tttgcagaattctgggaggagaattttggctgcaagttaggatcacatgggaaaaggaacagtcatataaagaaatgcacagggctggagcgaattgctcrggattcatcttatgaacaggaaggaaaggtccaatttgtaattgatgctgtatattccatggcttacgccctgcacaatatgcacaaagatctctgccct

SEQ ID NO: 644 - DNA, 201 bp, Homo sapiens
tgtgagagtcttgaaaccaacacttcctctaccaagacaacatatatcagttacagcaatcattcaatctgaaacagggaaatggcacaatctgaagagaygtggtatatgatcttaaatgatgaacatgagaccgcaaaaattcactcctggagatctccgtagactacaatcaatcaaatcaatagtcagtcttgtaag

SEQ ID NO: 645 - DNA, 201 bp, Homo sapiens
gagtacaaagtcatcggccactggaccaatcagcttcatgtggaagacatgcagtgggctcatagagaacatactcacccggcgtctgtctgcagcctgcygtgtaagccaggggagaggaagaaaacggtgaaaggggtcccttgctgctggcactgtgaacgctgtgaaggttacaactaccaggtggatgagctgtcc

SEQ ID NO: 646 - DNA, 201 bp, Homo sapiens; identical to SEQ ID NO: 629

SEQ ID NO: 647 - DNA, 201 bp, Homo sapiens; identical to SEQ ID NO: 630

SEQ ID NO: 648 - DNA, 201 bp, Homo sapiens; identical to SEQ ID NO: 631

SEQ ID NO: 649 - DNA, 201 bp, Homo sapiens; identical to SEQ ID NO: 632

SEQ ID NO: 650 - DNA, 201 bp, Homo sapiens; identical to SEQ ID NO: 633

SEQ ID NO: 651 - DNA, 201 bp, Homo sapiens; identical to SEQ ID NO: 634

SEQ ID NO: 652 - DNA, 201 bp, Homo sapiens; identical to SEQ ID NO: 635

SEQ ID NO: 653 - DNA, 201 bp, Homo sapiens; identical to SEQ ID NO: 636

SEQ ID NO: 654 - DNA, 201 bp, Homo sapiens
tcaaataaccaacaaaagcacagagtacaaagtcatcggccactggaccaatcagcttcatgtggaagacatgcagtgggctcatagagaacatactcacscggcgtctgtctgcagcctgccgtgtaagccaggggagaggaagaaaacggtgaaaggggtcccttgctgctggcactgtgaacgctgtgaaggttacaa

SEQ ID NO: 655 - DNA, 184 bp, Homo sapiens; identical to SEQ ID NO: 638

SEQ ID NO: 656 - DNA, 201 bp, Homo sapiens; identical to SEQ ID NO: 639

SEQ ID NO: 657 - DNA, 201 bp, Homo sapiens; identical to SEQ ID NO: 640

SEQ ID NO: 658 - DNA, 201 bp, Homo sapiens
ctggcactcctgtcacttttaatgaaaacggagatgctcctggacgttatgatatcttccagtatcaaataaccaacaaaagcacagagtacaaagtcatyggccactggaccaatcagcttcatgtggaagacatgcagtgggctcatagagaacatactcacccggcgtctgtctgcagcctgccgtgtaagccagggg

SEQ ID NO: 659 - DNA, 201 bp, Homo sapiens; identical to SEQ ID NO: 642

SEQ ID NO: 660 - DNA, 201 bp, Homo sapiens; identical to SEQ ID NO: 643

SEQ ID NO: 661 - DNA, 201 bp, Homo sapiens; identical to SEQ ID NO: 644

SEQ ID NO: 662 - DNA, 177 bp, Homo sapiens
tgctgttcagcatcctgaacattctggctctgtcttgggtggcggcagccgcggacagattggaaaaacgatgttawctcgccgcggccgcgacaagagctagcctccagtacggacgacgcctcactcgccgcggcgcaggcggtgcccgccgggataggaggtgcatttggacca

SEQ ID NO: 663 - DNA, 145 bp, Homo sapiens
gcttcagcagctatctagaaccatatggtggaagccacttactgagaactgtgaaacaagagcctgggtccctgacatatgaagccaccatacctaccttmaagtgtctttcacttgagggaaaaatacatctttcttaggtaag

SEQ ID NO: 664 - DNA, 174 bp, Homo sapiens
tgctgttcagcatcctgaacattctggctctgtcttgggtggcggcagccgcggacagattggaaaaacgatgytaactcgccgcggccgcgacaagagctagcctccagtacggacgacgcctcactcgccgcggcgcaggcggtgcccgccgggataggaggtgcatttgga

SEQ ID NO: 665 - DNA, 201 bp, Homo sapiens
ttggaccagatgacacccaatgtcccattcaacggtcgcattctgtcatccacaggaattagtcctgtatccgaaacattctctggtagtcaaaagcttayaagcacaagatgtgaaggaggccacacttaaaaaaaaacttgaaatggagtttcatttggaaggacactgactaaggaaaaacagagaaaaggatgaaac

SEQ ID NO: 666 - DNA, 121 bp, Homo sapiens
tgctgttcagcatcctgaacrttctggctctgtcttgggtggcggcagccgcggacagattggaaaaacgatgttaactcgccgcggccgcgacaagagctagcctccagtacggacgacg

SEQ ID NO: 667 - DNA, 198 bp, Homo sapiens
cagtgctgggctcaagaacccgaccaaagacctacttttcatagaattcagaaccaacttcagttattcagaaattttttcttaaatagcatttatcagtscagagatgaagcaaacaacagtggagtcataaatgaaagctttgaaggtaagtttgattcttcagaattttctagttttcgctgcactgtgaactga

SEQ ID NO: 668 - DNA, 201 bp, Homo sapiens
aatggggtgttaacaaaatttgaaattttctacaatatatccaatcaaagtattacaaacaaaacatgtgaagactggattgctgtcaatgtcactccctyagtgatgtcttttcaacttgaaggcatgagtcccagatgctttattgccttccaggttagggcctttacatctaaggggccaggaccatatgctgacgtt

SEQ ID NO: 669 - DNA, 201 bp, Homo sapiens
tccagaaagctttaagacaaaagctggagtcccaaataaaccaggcattcccaaattactagaagggagtaaaaattcaatacagtgggagaaagctgaasataatggatgtagaattacatactatatccttgagataagaaagagcacttcaaataatttacagaaccagaatttaaggtggaagatgacatttaatgg

SEQ ID NO: 670 - DNA, 201 bp, Homo sapiens
gacaaacctcacatggtatggcatcaccagccctactccaacatacctggtttattatgcagaagttaatgacaggaaaaacagctctgacttgaaatatrgaattctggaatttcaggacagtatagctcttattgaagatttacaaccattttcaacatacatgatacagatagctgtaaaaaattattattcagatcc

SEQ ID NO: 671 - DNA, 201 bp, Homo sapiens
cccctccaagtcccagttacaggactcatcctcatggagttcctgaaactgcacctttgattaggaatattgagagctcaagtcccgacactgtggaagtyagctgggatccacctcaattcccaggtggacctattttgggttataacttaaggctgatcagcaaaaatcaaaaattagatgcagggacacagagaacca

SEQ ID NO: 672 - DNA, 201 bp, Homo sapiens
agtctacaacatcagaaatcaacccatttcctcacctcataactcttcttggtaacaagatagtttttttagatatggatcaaaatcaagttgtgtggacrttttcagcagaaagagttatcagtgccgtttgctacacagctgataatgagatgggatattatgctgaaggggactcactctttcttctgcacttgcaca

SEQ ID NO: 673 - DNA, 201 bp, Homo sapiens
tttactcaccttggttgaccttgtagacctgtgtgtagatatttcaaaaggctgtgtctacttggaacggatgcatttcattcacagggatctggcagctmgaaattgccttgtttccgtgaaagactataccagtccacggatagtgaagattggagactttggactcgccagagacatctataaaaatgattactatag

SEQ ID NO: 674 - DNA, 125 bp, Homo sapiens
attttttcttaaatagcatttatcagtgcagagatgaagcaaacaacagtggagtcataaatgaaagctttgaaggtaagtttgattcttcagaattttcyagttttcgctgcactgtgaactga

SEQ ID NO: 675 - DNA, 201 bp, Homo sapiens
atcagaaaaactgtgctttaaagtgtcgggagtcgtgtgaggttggctgtagcagcgcggaaggtgcatatgaagaggaagtactggaaaatgcagacctwccaactgctccctttgcttcttccattggaagccacaatatgacattacgatggaaatctgcaaacttctctggagtaaaatacatcattcagtggaaat

SEQ ID NO: 676 - DNA, 201 bp, Homo sapiens
ggtcactttctctactgggctggaaagacatatgtgatacaaaggcagtctgtgttgacgggacacacagacattgttacccacgtgaagctattggtgartgacatggtggtggattcagttggtggatatctctactggaccacactctattcagtggaaagcaccagactaaatggggaaagttcccttgtactacag

SEQ ID NO: 677 - DNA, 164 bp, Homo sapiens
cttttcatagaattcagaaccaacttcagttattcagaaattttttcttaaatagcatttatcagtgcagagatgaagcaaacaacagtggagtcataaakgaaagctttgaaggtaagtttgattcttcagaattttctagttttcgctgcactgtgaactga

SEQ ID NO: 678 - DNA, 201 bp, Homo sapiens
taagtggaaccatgctgaatgtacctgagctgcagagtgctatgaaatacaaggtttctgtgagagcaagttctccaaagaggccaggcccctggtcagarccctcagtgggtactaccctggtgccagctagtgaaccaccatttatcatggctgtgaaagaagatgggctttggagtaaaccattaaatagctttggcc

SEQ ID NO: 679 - DNA, 201 bp, Homo sapiens
cctgaagtcactcatattttcttgaacataagtggaaccatgctgaatgtacctgagctgcagagtgctatgaaatacaaggtttctgtgagagcaagttytccaaagaggccaggcccctggtcagagccctcagtgggtactaccctggtgccagctagtgaaccaccatttatcatggctgtgaaagaagatgggctt

SEQ ID NO: 680 - DNA, 201 bp, Homo sapiens
ccagagaaccccagaatatttatattaccaagtggaaaatgctgcaacaagaatgaagttgtggtggaatttaggtggaacaaacctaagcatgaaaatgrggtgttaacaaaatttgaaattttctacaatatatccaatcaaagtattacaaacaaaacatgtgaagactggattgctgtcaatgtcactccctcagtg

SEQ ID NO: 681 - DNA, 201 bp, Homo sapiens
gagagatggcatttatagagcagaccttcctgtaccatctggccggtgtgcagaagctgtgcgtattgtggagagttgcacgttaaaggactttgcaatcragccacaagccaagcgaatcatttacttcaatgacactgcccaagtcttcatgtcaacatttctggatggctctgcttcccatctcatcctacctcgcat

SEQ ID NO: 682 - DNA, 201 bp, Homo sapiens
actaaatggggaaagttcccttgtactacagacacagccttggttttctgggaaaaaggtaattgctctaactttagacctcagtgatgggctcctgtatyggttggttcaagacagtcaatgtattcacctgtacacagctgttcttcggggacagagcactggggataccaccatcacagaatttgcagcctggagtac

SEQ ID NO: 683 - DNA, 201 bp, Homo sapiens
gtgaaaacaatgactttcttgtcacagatggcaaggtcattttccaacaggatgctttgtcttttaatgaattcatcgtgggatgtgacctgagtcacatrgaagaatttgggtttggtaacttggtcatctttggctcatcctcccagctgcaccctctgccaggccgcccgcaggagctttcggtgctgtttggctctc

SEQ ID NO: 684 - DNA, 201 bp, Homo sapiens
gtccaccagcaaattgtttatttctctgaaggaactctcatatgggcgaagaaggctgccaacatgtctgatgtatctgacctgagaattttttacagagsttcaggattaatttcttctatctccatagattggctttatcaaagaatgtatttcatcatggatgaactggtatgtgtctgtgatttagagaactgctca

SEQ ID NO: 685 - DNA, 105 bp, Homo sapiens
ctgtwacaagctttcaagcattcaaaggtctaaatgaaaaaggctaagtattatttcaaaaggcaagtatatcctaatatagcaaaacaaacaaagcaaaatcca

SEQ ID NO: 686 - DNA, 201 bp, Homo sapiens
catcccaacattctgaagcagcttggagtttgtctgctgaatgaaccccaatacattatcctggaactgatggagggaggagaccttcttacttatttgcrtaaagcccggatggcaacgttttatggtcctttactcaccttggttgaccttgtagacctgtgtgtagatatttcaaaaggctgtgtctacttggaacgg

SEQ ID NO: 687 - DNA, 201 bp, Homo sapiens
tcacaattattcagacatcccttaagcccctgccagggaacttttcctttacccctaaggttattccagattctgttcaagagtcttcatttaggattgarggaaatgcttcaagttttcaaatcctgtggaatggtccccctgcggtagactggggtgtagttttctacagtgtagaatttagtgctcattctaagttct

SEQ ID NO: 688 - DNA, 201 bp, Homo sapiens
gcagctcattaatacaactgtgcggtcagacaccagcctcattatatcttggagagaatctcacaagccaaatggacctaaagaatcagtccgttatcagytggcaatctcacacctggccctaattcctgaaactcctctaagacaaagtgaatttccaaatggaaggctcactctccttgttactagactgtctggtgg

SEQ ID NO: 689 - DNA, 201 bp, Homo sapiens
aagccacaatatgacattacgatggaaatctgcaaacttctctggagtaaaatacatcattcagtggaaatatgcacaacttctgggaagctggacttatmctaagactgtgtccagaccgtcctatgtggtcaagcccctgcaccccttcactgagtacattttccgagtggtttggatcttcacagcgcagctgcagct

SEQ ID NO: 690 - DNA, 201 bp, Homo sapiens
acaagctttcaagcattcaaaggtctaaatgaaaaaggctaagtattatttcaaaaggcaagtatatcctaatatagcaaaacaaacaaagcaaaatccawcagctactcctccaattgaagtgatgaagcccaaataattcatatagcaaaatggagaaaattagaccggccatctaaaaatctgccattggtgaagtga

SEQ ID NO: 691 - DNA, 201 bp, Homo sapiens
gacccagtgctgggctcaagaacccgaccaaagacctacttttcatagaattcagaaccaacttcagttattcagaaattttttcttaaatagcatttatmagtgcagagatgaagcaaacaacagtggagtcataaatgaaagctttgaaggtaagtttgattcttcagaattttctagttttcgctgcactgtgaactg

SEQ ID NO: 692 - DNA, 201 bp, Homo sapiens
actggagccaccaagaaattgtcctgatgatctgtggaatttaatgacccagtgctgggctcaagaacccgaccaaagacctacttttcatagaattcagraccaacttcagttattcagaaattttttcttaaatagcatttatcagtgcagagatgaagcaaacaacagtggagtcataaatgaaagctttgaaggtaa

SEQ ID NO: 693 - DNA, 201 bp, Homo sapiens
tggaatatttctggttgttacaatcccactgacctttgtctggcatagaagattaaagaatcaaaaaagtgccaaggaaggggtgacagtgcttataaacraagacaaagagttggctgagctgcgaggtctggcagccggagtaggcctggctaatgcctgctatgcaatacatactcttccaacccaagaggagattga

SEQ ID NO: 694 - DNA, 201 bp, Homo sapiens
aaatatgcacaacttctgggaagctggacttatactaagactgtgtccagaccgtcctatgtggtcaagcccctgcaccccttcactgagtacattttccragtggtttggatcttcacagcgcagctgcagctctactcccctccaagtcccagttacaggactcatcctcatggagttcctgaaactgcacctttgatt

SEQ ID NO: 695 - DNA, 201 bp, Homo sapiens
caggaatctgaatcttgtggtctgaggaaagaagagaaggaaccacatgcagacaaagatttctgccaagaaaaacaagtggcttactgcccttctggcargcctgaaggcctgaactatgcctgtctcactcacagtggatatggagatgggtctgattaatagcgttgtttgggaaatagagagttgagataaacactc

SEQ ID NO: 696 - DNA, 201 bp, Homo sapiens
cagtgctgggctcaagaacccgaccaaagacctacttttcatagaattcagaaccaacttcagttattcagaaattttttcttaaatagcatttatcagtscagagatgaagcaaacaacagtggagtcataaatgaaagctttgaaggtgaagatggcgatgtgatttgtttgaattcagatgacattatgccagttgct

SEQ ID NO: 697 - DNA, 201 bp, Homo sapiens; identical to SEQ ID NO: 668

SEQ ID NO: 698 - DNA, 201 bp, Homo sapiens; identical to SEQ ID NO: 669

SEQ ID NO: 699 - DNA, 201 bp, Homo sapiens; identical to SEQ ID NO: 670

SEQ ID NO: 700 - DNA, 201 bp, Homo sapiens; identical to SEQ ID NO: 671

SEQ ID NO: 701 - DNA, 201 bp, Homo sapiens; identical to SEQ ID NO: 672

SEQ ID NO: 702 - DNA, 201 bp, Homo sapiens; identical to SEQ ID NO: 673

SEQ ID NO: 703 - DNA, 201 bp, Homo sapiens; identical to SEQ ID NO: 675

SEQ ID NO: 704 - DNA, 201 bp, Homo sapiens; identical to SEQ ID NO: 676

SEQ ID NO: 705 - DNA, 201 bp, Homo sapiens
cttttcatagaattcagaaccaacttcagttattcagaaattttttcttaaatagcatttatcagtgcagagatgaagcaaacaacagtggagtcataaakgaaagctttgaaggtgaagatggcgatgtgatttgtttgaattcagatgacattatgccagttgctttaatggaaacgaagaaccgagaagggttaaact

SEQ ID NO: 706 - DNA, 201 bp, Homo sapiens; identical to SEQ ID NO: 678

SEQ ID NO: 707 - DNA, 201 bp, Homo sapiens; identical to SEQ ID NO: 679

SEQ ID NO: 708 - DNA, 201 bp, Homo sapiens; identical to SEQ ID NO: 680

SEQ ID NO: 709 - DNA, 201 bp, Homo sapiens; identical to SEQ ID NO: 681

SEQ ID NO: 710 - DNA, 201 bp, Homo sapiens; identical to SEQ ID NO: 682

SEQ ID NO: 711 - DNA, 201 bp, Homo sapiens; identical to SEQ ID NO: 683

SEQ ID NO: 712 - DNA, 201 bp, Homo sapiens; identical to SEQ ID NO: 684

SEQ ID NO: 713 - DNA, 105 bp, Homo sapiens; identical to SEQ ID NO: 685

SEQ ID NO: 714 - DNA, 201 bp, Homo sapiens; identical to SEQ ID NO: 686

SEQ ID NO: 715 - DNA, 201 bp, Homo sapiens; identical to SEQ ID NO: 687

SEQ ID NO: 716 - DNA, 201 bp, Homo sapiens; identical to SEQ ID NO: 688

SEQ ID NO: 717 - DNA, 201 bp, Homo sapiens; identical to SEQ ID NO: 689

SEQ ID NO: 718 - DNA, 201 bp, Homo sapiens; identical to SEQ ID NO: 690

SEQ ID NO: 719 - DNA, 201 bp, Homo sapiens
gacccagtgctgggctcaagaacccgaccaaagacctacttttcatagaattcagaaccaacttcagttattcagaaattttttcttaaatagcatttatmagtgcagagatgaagcaaacaacagtggagtcataaatgaaagctttgaaggtgaagatggcgatgtgatttgtttgaattcagatgacattatgccagt

SEQ ID NO: 720 - DNA, 201 bp, Homo sapiens
actggagccaccaagaaattgtcctgatgatctgtggaatttaatgacccagtgctgggctcaagaacccgaccaaagacctacttttcatagaattcagraccaacttcagttattcagaaattttttcttaaatagcatttatcagtgcagagatgaagcaaacaacagtggagtcataaatgaaagctttgaaggtga

SEQ ID NO: 721 - DNA, 201 bp, Homo sapiens; identical to SEQ ID NO: 693

SEQ ID NO: 722 - DNA, 201 bp, Homo sapiens; identical to SEQ ID NO: 694

SEQ ID NO: 723 - DNA, 201 bp, Homo sapiens
gacgggcacagccagaagctgcacctggccgagaacgccgagcctgaggagcagtccgctgcgtaggcgtcccacgcaggcccacactgcccctctcattytcttcaaactgtgactttttacagactcgggcgggtgttctgcggccccccaggtgctatgggggaggggggcgttgaatggaattaaaccagaaagaaa

SEQ ID NO: 724 - DNA, 201 bp, Homo sapiens
cgttcgggagatgcaggagaagctagcccggctgcacttcagcctggatgtgtgtggggaggaggaggacgatgaagaggaagaggatggggtcactgagrggctgccagaggagcagaagaagacaatggctgaccgtaacctggaccagctgcttagcaatctggaagacctcagtaattctatgtatcctttccaagg

SEQ ID NO: 725 - DNA, 201 bp, Homo sapiens
tccaggcctgaggcccagccagcgcccaatggatgacaaaaagaagaaacggagtcccaagccctgcctggcccagccagcccaggccccaggcacactayggagggtccctgtgcctaccagccacagcggctccttggccctaggacttcctcatctgccatcccccaagcagcgggccaagttcaagagagtaggcaa

SEQ ID NO: 726 - DNA, 201 bp, Homo sapiens
acgttcgggagatgcaggagaagctagcccggctgcacttcagcctggatgtgtgtggggaggaggaggacgatgaagaggaagaggatggggtcactgargggctgccagaggagcagaagaagacaatggctgaccgtaacctggaccagctgcttagcaatctggaagacctcagtaattctatgtatcctttccaag

SEQ ID NO: 727 - DNA, 201 bp, Homo sapiens
ctaccacctcacctggtcctcagtcagaaacagcgcgagtgcgcgcgcacacaccccagtgtgtctgacctgcacgatctggatgaagagagagggggtgmgagagggcaggcggggactgcaacctcagtccacagacggcccgagaccctcgtccccggccctttgcacaggtgagggaactaaacctgtgcaagatgg

SEQ ID NO: 728 - DNA, 201 bp, Homo sapiens
cagtctgcggctgtttggtgaccatgactattgccagtcaattaattccaaaacggaaatactcattaatatatcacaggagctccaagactctagacaamtagaaaataaagatgtctcctctgattggcaggggcagatttgttcttccacagattcagaccagtgctacctgagagagactttggaggcaagcaagca

SEQ ID NO: 729 - DNA, 201 bp, Homo sapiens
cacaagaaaacagctccaagaccaggaaatccgagccgagctgaacaagcacttcggtcatcccagtcaagctgtttttgacgacgaagcagacaagaccrgtgaactgagggacagtgatttcagtaatgaacaattctccaaactacctatgtttataaattcaggactagccatggatggcctgtttgatgacagcga

SEQ ID NO: 730 - DNA, 201 bp, Homo sapiens
caagactctagacaactagaaaataaagatgtctcctctgattggcaggggcagatttgttcttccacagattcagaccagtgctacctgagagagacttyggaggcaagcaagcaggtctctccttgcagcacaagaaaacagctccaagaccaggaaatccgagccgagctgaacaagcacttcggtcatcccagtcaa

SEQ ID NO: 731 - DNA, 201 bp, Homo sapiens
tcccgatcaccatattccaggtcaagatcaaggtctccaggcagtagatcctcttcaagatcctgctattactatgagtcaagccactacagacaccgcaygcaccgaaattctcccttgtatgtgagatcacgttcaagatcgccctacagccgtcggcccaggtatgacagctacgaggaatatcagcacgagaggctg

SEQ ID NO: 732 - DNA, 201 bp, Homo sapiens
acagtctccctgtggatgaagacggattgccctcatttgatgcgctgacagatggagacgtgaccactgacaatgaggctagtccttcctccatgcctgayggcacccctccaccccaggaggcagaagagccgtctctacttaagaagctcttactggcaccagccaacactcagctaagttataatgaatgcagtggtc

SEQ ID NO: 733 - DNA, 201 bp, Homo sapiens
cctagattcaaactcagatgactttgaccctgcttccaccaagagcaagtatgactctctggattttgatagtttactgaaagaagctcagagaagcttgygcaggtaacatgttccctagctgaggatgacagagggatggcgaatacctcatgggacagcgcgtccttccctaaagactattgcaagtcatacttagga

SEQ ID NO: 734 - DNA, 201 bp, Homo sapiens
cctcagtcctcactggtggacacgaggaaaggaagaccaagcggcccagtctgcggctgtttggtgaccatgactattgccagtcaattaattccaaaacrgaaatactcattaatatatcacaggagctccaagactctagacaactagaaaataaagatgtctcctctgattggcaggggcagatttgttcttccacag

SEQ ID NO: 735 - DNA, 201 bp, Homo sapiens
aggtctctccttgcagcacaagaaaacagctccaagaccaggaaatccgagccgagctgaacaagcacttcggtcatcccagtcaagctgtttttgacgaygaagcagacaagaccggtgaactgagggacagtgatttcagtaatgaacaattctccaaactacctatgtttataaattcaggactagccatggatggcc

SEQ ID NO: 736 - DNA, 201 bp, Homo sapiens
ccaaactacctatgtttataaattcaggactagccatggatggcctgtttgatgacagcgaagatgaaagtgataaactgagctacccttgggatggcacrcaatcctattcattgttcaatgtgtctccttcttgttcttcttttaactctccatgtagagattctgtgtcaccacccaaatccttattttctcaaagac

SEQ ID NO: 737 - DNA, 201 bp, Homo sapiens
agcaggtctctccttgcagcacaagaaaacagctccaagaccaggaaatccgagccgagctgaacaagcacttcggtcatcccagtcaagctgtttttgaygacgaagcagacaagaccggtgaactgagggacagtgatttcagtaatgaacaattctccaaactacctatgtttataaattcaggactagccatggatg

SEQ ID NO: 738 - DNA, 201 bp, Homo sapiens; identical to SEQ ID NO: 730

SEQ ID NO: 739 - DNA, 201 bp, Homo sapiens
aaatggcagcagttccatgaagacacgcttaaaacctagaacttcaaaatgttcgtattctattcaaaaggaaaaatatatatatatatatatatatatataaattaaaaaggaaagaaaactaacaaccaaccaaccaaccaaccaaccacaaaccaccctaaaatgacagccgctgatgtctgggcatcagcctttgta

SEQ ID NO: 740 - DNA, 201 bp, Homo sapiens; identical to SEQ ID NO: 731

SEQ ID NO: 741 - DNA, 201 bp, Homo sapiens
tttaggggaagtatgtgtgggtacatgtgaggactgggggcacctgaccagaatgcgcaagggcaaaccatttcaaatggcagcagttccatgaagacacrcttaaaacctagaacttcaaaatgttcgtattctattcaaaaggaaaaatatatatatatatatatatatatataaattaaaaaggaaagaaaactaaca

SEQ ID NO: 742 - DNA, 201 bp, Homo sapiens; identical to SEQ ID NO: 732

SEQ ID NO: 743 - DNA, 201 bp, Homo sapiens; identical to SEQ ID NO: 733

SEQ ID NO: 744 - DNA, 201 bp, Homo sapiens
cagaatgcgcaagggcaaaccatttcaaatggcagcagttccatgaagacacgcttaaaacctagaacttcaaaatgttcgtattctattcaaaaggaaawatatatatatatatatatatatatataaattaaaaaggaaagaaaactaacaaccaaccaaccaaccaaccaaccacaaaccaccctaaaatgacagccg

SEQ ID NO: 745 - DNA, 201 bp, Homo sapiens; identical to SEQ ID NO: 737

SEQ ID NO: 746 - DNA, 201 bp, Homo sapiens; identical to SEQ ID NO: 735

SEQ ID NO: 747 - DNA, 201 bp, Homo sapiens; identical to SEQ ID NO: 736

SEQ ID NO: 748 - DNA, 201 bp, Homo sapiens
tgtcaacattcaaagcagcagagagggaactttgcactattggggtatgatgtttgggtcagttgataaaaggaaaccttttcatgcctttagatgtgagyttccagtaggtaatgattatgtgtcctttcttgatggctgtaatgagaacttcaatcactgtagtctaagacctgatctatagatgacctagaatagcca

SEQ ID NO: 749 - DNA, 201 bp, Homo sapiens
agcatagatctgtaggatttttagaagaccgtgggccattgccttcatgccgtggtaagtaccacatctacaattttggtaaccgaactggtgctttagtratgtggatttttttcttttttaaaagagatgtagcagaataattcttccagtgcaacaaaatcaattttttgctaaacgactccgagaacaacagttggg

SEQ ID NO: 750 - DNA, 201 bp, Homo sapiens; identical to SEQ ID NO: 729

SEQ ID NO: 751 - DNA, 201 bp, Homo sapiens
tgaatccactgtttgtcctgtcggatgcttgcttgattttttggcttcttatttctaagtagatagaaagcaataaaaatactatgaaatgaaagaacttsttcacaggttctgcgttacaacagtaacacatctttaatccgcctaattcttgttgttctgtaggttaaatgcaggtattttaactgtgtgaacgccaaa

SEQ ID NO: 752 - DNA, 201 bp, Homo sapiens
ctctcgcccaacacgatcttgtaagatggatttcacccccaggccaatgcagctaattttgatagctgcattcatttatcaccagcatattgtgttctgartgaatccactgtttgtcctgtcggatgcttgcttgattttttggcttcttatttctaagtagatagaaagcaataaaaatactatgaaatgaaagaactt

SEQ ID NO: 753 - DNA, 201 bp, Homo sapiens
catgacttttctggaagacatgatacacctactactcaattgttcttttcctttctctcgcccaacacgatcttgtaagatggatttcacccccaggccartgcagctaattttgatagctgcattcatttatcaccagcatattgtgttctgagtgaatccactgtttgtcctgtcggatgcttgcttgattttttggct

SEQ ID NO: 754 - DNA, 201 bp, Homo sapiens; identical to SEQ ID NO: 728

SEQ ID NO: 755 - DNA, 201 bp, Homo sapiens; identical to SEQ ID NO: 734

SEQ ID NO: 756 - DNA, 201 bp, Homo sapiens
caagctttctctcataacgtaatgattatatgacaatcctgaagaaaccacaggttccatagaactaatatcctgtctctctctctctctctctctctctyttttttttttctttttccttttgccatggaatctgggtgggagaggatactgcgggcaccagaatgctaaagtttcctaacattttgaagtttctgtagt

SEQ ID NO: 757 - DNA, 201 bp, Homo sapiens
tggcagcagttccatgaagacacgcttaaaacctagaacttcaaaatgttcgtattctattcaaaaggaaaaatatatatatatatatatatatatataaattaaaaaggaaagaaaactaacaaccaaccaaccaaccaaccaaccacaaaccaccctaaaatgacagccgctgatgtctgggcatcagcctttgtactc

SEQ ID NO: 758 - DNA, 201 bp, Homo sapiens
tggtattaaagaggtgaacatgattgaagatgggacagtttttcatttcaacgatcccaaagtctaacctctgtctgccccctctctgttaacatctttgsaattacctctctctgctcctctctctagttcttctctctctgctaacacctttgcagttaccagtcatgcagaagccaaaccaatcacagaaatgtttcc

SEQ ID NO: 759 - DNA, 201 bp, Homo sapiens
aagtggaaatggcttaagatgctcatagcccagccccggctgtgtctactccaggccaagcctgggctgcagtccttgctatgttccccccagggccctgrggggagggatcagggtgctgggggtttcctaggacaggggtcttcccccttgagacaccaagctctggctctagaagagctctctcctggagtggggagt

SEQ ID NO: 760 - DNA, 201 bp, Homo sapiens
agagggttgggaggcagcagagcatgggtgacagtgggagcacacgacttccttggagcctgggcctttgcgggtcccaggtggtcaggcagctggagcaraagtggaaatggcttaagatgctcatagcccagccccggctgtgtctactccaggccaagcctgggctgcagtccttgctatgttccccccagggccctg

SEQ ID NO: 761 - DNA, 201 bp, Homo sapiens
ttttaatctagggtaggcagttgtggtagcccagcattttcctgtggacgagacatggtgcatgttgttgctggattgaatggaacccattcctgtccccyggcctcgtcttctgtcctcacttttggtcatccacacccatgagcagcttcagcagagtgtaggtcccacttcaccccattctcctctcctctgacccct

SEQ ID NO: 762 - DNA, 201 bp, Homo sapiens
gataggctctgattaattagttactctgactctggtctgccgagatccatttccaacccagttgcgttgggagagggttgggaggcagcagagcatgggtracagtgggagcacacgacttccttggagcctgggcctttgcgggtcccaggtggtcaggcagctggagcagaagtggaaatggcttaagatgctcatagc

SEQ ID NO: 763 - DNA, 201 bp, Homo sapiens
ggctgtgtgttagttctgagcaaatccctcaccaagacccttccctcccaagccctcaaagaaatgaggcaaagcccttccctgcaagaccccttgtggaygtttttgcatctacctgatttttagccccacccagggagactttataccccatgatcctgccccaccgttgctgttgtctgccagctgggtctagcatca

SEQ ID NO: 764 - DNA, 201 bp, Homo sapiens
ccccacccagggagactttataccccatgatcctgccccaccgttgctgttgtctgccagctgggtctagcatcacagggaagggggggatttatactcayggaaagactactgatcctaccggaaaccaacctgtttactgtactgttgtaaatatcatgccctttatatcctgtatattggcttcttttaaataaagtg

SEQ ID NO: 765 - DNA, 201 bp, Homo sapiens
gattcaagaaacttctgaaggagaaggacgtagcataccagataaaaattctatgtttgttcatcaagattcagtgtcaaaactccaaatgcaagaaaagraaaaaataactcctggaagggaaaggcgtaatactcgtattgtagtaccaaatgaaaatgtgatttctgttcatcaagattcaaagtcaaaactccaaat

SEQ ID NO: 766 - DNA, 201 bp, Homo sapiens
atagtacaactgagagaggtacaataaatgatgcaattaagacgcagttaaagagaaagagttaccctgagactgtcttaaaacacttgaaaggtgttaayggaaaagatataataaagcatctaatcaacatacagtcaaagagtcatgcagagactgataagaacttctttgcctatgctactggaagaggtctaatga

SEQ ID NO: 767 - DNA, 201 bp, Homo sapiens
ccagataaaaattctatgtttgttcatcaagattcagtgtcaaaactccaaatgcaagaaaagaaaaaaataactcctggaagggaaaggcgtaatactcrtattgtagtaccaaatgaaaatgtgatttctgttcatcaagattcaaagtcaaaactccaaatgcaagaaaagaaacaaataaattctggagtggaaaga

SEQ ID NO: 768 - DNA, 201 bp, Homo sapiens
ccaccttcctttactgaatcaactcccttcagggcattcgaaagttgttaccttaagccaaaaaactattgaatttactctgcctactgtgaccaatacarttggaaaacctacctataaagtgttacatgctgctgcccgaaaatctgtaccacacccatacttttgagaatgaaggaaattctgagcaagataagcaac

SEQ ID NO: 769 - DNA, 201 bp, Homo sapiens
aaagagtttccctgggcctgatatagaacaattgacagatgcatttggaagagatatactaaaggatgaattcaagacacgatcaaagagtctccctgagrctgatgaacgattgcatagtacaactgagagaggtacaataaatgatgcaattaagacgcagttaaagagaaagagttaccctgagactgtcttaaaaca

SEQ ID NO: 770 - DNA, 201 bp, Homo sapiens
caagatgaatcagcatttttagagagttcaaatgaagtttcagttgctgaaaaccaatcctataaatctccatcagagacccatgataaatcacttacaayagtatcatccagcaaagaagttcaagattcactgtctgttggaacattggctcaaaaaaacgaaacagtgatatcaccattcattttacctcctgttctt

SEQ ID NO: 771 - DNA, 201 bp, Homo sapiens
gaacccttgacaaatgccattggttcaagtaaaacaattggtgagataaagacacaactaaggactcactatgatgtgaacttatttaaaaacaaagataygtccgtacaacgtcaagaaggtatctttactaggagcattacaccaagtaaattcccaacaaaagtgatcaatttatcaccctttgaaaataaagaggaa

SEQ ID NO: 772 - DNA, 201 bp, Homo sapiens
gacacaagacgtttcctttagaaatcaaaaaaaaggatatatcacttgaacatctgttgcctgaggagaaagttttattatcaagaagcgaatctcaaacsaagaaacttcaagctaaagtaacttcaagaaaaaagactgatatagaaagcttgagaggtgctttgggaagacgcttattaaatgatgaattcaagacac

SEQ ID NO: 773 - DNA, 201 bp, Homo sapiens
gaatgaaggaaattctgagcaagataagcaacatgacaaattcagaaatgcaggaaaggaaattgcaagtatagaagccttttgaaaataatactgactcrtgtggatggtgcttattgaaaaacagctggaaatacagtggatcaacagggtaggcccagatcacagaaggcctgaccaggcagtgaatgtgtctttacc

SEQ ID NO: 774 - DNA, 196 bp, Homo sapiens
acttaaaagtgaggggaaaactgagacaacaatgcaagtgggtaatagtcaaacaaaagttaaaggtgaagattcaaaaaatataccattggagamagaaacaagaaaatcactggtttcagattcaggtggacaaaggacaagtgataaaatccaagaatatccacagctcagagaagaaacgatctagccctgc

SEQ ID NO: 775 - DNA, 201 bp, Homo sapiens
aagagaaagagttaccctgagactgtcttaaaacacttgaaaggtgttaatggaaaagatataataaagcatctaatcaacatacagtcaaagagtcatgsagagactgataagaacttctttgcctatgctactggaagaggtctaatgaaggagtcaaccacgacacaattaaaaagtcacccagagactgataaggaa

SEQ ID NO: 776 - DNA, 201 bp, Homo sapiens
aacttaccaagcagcagaaaaatctcaagctcataatgaagtaccaaatgaaaggcttgtagttgagcatcaagaatcattgtcaaaaaccaaattacaartaaagaaacaagaaacttctacagagcaaccactcaccactcctgataaagaaccaaatgaaaatcttatacttaggcatcaagactcaatgtcaaaatc

SEQ ID NO: 777 - DNA, 201 bp, Homo sapiens
ctaggttgcaaggataataattttagtaatttatttcctaccgccttatactttaccaaatactttatgttccctcataccttaaccactaccctttaaarttcatggggcaatattaccagtatcttacactttagaaaacagaggctgaggctgggcacggtggctcatgcctgtaatcccagcactttgggaggccaa

SEQ ID NO: 778 - DNA, 201 bp, Homo sapiens
cttttcacgtcagctaggttgcaaggataataattttagtaatttatttcctaccgccttatactttaccaaatactttatgttccctcataccttaaccrctaccctttaaagttcatggggcaatattaccagtatcttacactttagaaaacagaggctgaggctgggcacggtggctcatgcctgtaatcccagcac

SEQ ID NO: 779 - DNA, 201 bp, Homo sapiens
gagcccaggccctctgtgccgccctcacagtgaaccaggccatgcggaagatgcagctgtcagggaatggcctggaggagcaggcggcccagcaccttgcygaactcctgctggcccacacagacctgaagtccctggacctgagctacaaccagctgaatgaccaagcagatctgtgcatgggactgcagggcttcctca

SEQ ID NO: 780 - DNA, 201 bp, Homo sapiens
ttgcccagccccccaggtctccatggccatgacggagccctacaactccatcctgaccacctacacgaccctggaacattctgactgtgccttcatagtcracagcaaagccacctatgacatgtcagcacaacctggacatcgagtgtcccacgtacaccaacctcagtcgtctgggcagatcgtgtcctccatcacggc

SEQ ID NO: 781 - DNA, 201 bp, Homo sapiens
cctatgacatgtcagcacaacctggacatcgagtgtcccacgtacaccaacctcagtcgtctgggcagatcgtgtcctccatcacggcctccctgtgattygatggggccctgaatgtgtacttgacagaattccaaaccaacttggtgccatacccccacatccacctccccctggccacctacgccctggtcatctcag

SEQ ID NO: 782 - DNA, 201 bp, Homo sapiens
ctcagtcgtctgggcagatcgtgtcctccatcacggcctccctgtgattcgatggggccctgaatgtgtacttgacagaattccaaaccaacttggtgccrtacccccacatccacctccccctggccacctacgccctggtcatctcagccaagaaggcctaccatgagcagctgtccgtggccaagatcgccagtgccc

SEQ ID NO: 783 - DNA, 201 bp, Homo sapiens
tgcaaggataataattttagtaatttatttcctaccgccttatactttaccaaatactttatgttccctcataccttaaccactaccctttaaagttcatkgggcaatattaccagtatcttacactttagaaaacagaggctgaggctgggcacggtggctcatgcctgtaatcccagcactttgggaggccaaggcagg

SEQ ID NO: 784 - DNA, 201 bp, Homo sapiens
tagaaaacagaggctgaggctgggcacggtggctcatgcctgtaatcccagcactttgggaggccaaggcaggcagatcacgaggtcaggagattgagacsgtcctggctaacacggtgaaaccccggctctactaaaaaatacaaaaaattagccgggtgtggtggcagacacctgtggtcccagctattcgggaggctg

SEQ ID NO: 785 - DNA, 201 bp, Homo sapiens
gcctccctgtgattcgatggggccctgaatgtgtacttgacagaattccaaaccaacttggtgccatacccccacatccacctccccctggccacctacgycctggtcatctcagccaagaaggcctaccatgagcagctgtccgtggccaagatcgccagtgcccgcttcgagccagccaatcagatggtcaagtgtgac

SEQ ID NO: 786 - DNA, 201 bp, Homo sapiens
cacctacgccctggtcatctcagccaagaaggcctaccatgagcagctgtccgtggccaagatcgccagtgcccgcttcgagccagccaatcagatggtcwagtgtgaccctcaccatggcaagtacatggcctgctgcatgttgtacagaggggatgtggtcctgaaagatgtcagtgcggctgtcgccaccatcaagag

SEQ ID NO: 787 - DNA, 201 bp, Homo sapiens
gcctaccatgagcagctgtccgtggccaagatcgccagtgcccgcttcgagccagccaatcagatggtcaagtgtgaccctcaccatggcaagtacatggsctgctgcatgttgtacagaggggatgtggtcctgaaagatgtcagtgcggctgtcgccaccatcaagagcaagcacaccaaccagtttgtggactggtgt

SEQ ID NO: 788 - DNA, 201 bp, Homo sapiens
agaaaacagaggctgaggctgggcacggtggctcatgcctgtaatcccagcactttgggaggccaaggcaggcagatcacgaggtcaggagattgagaccrtcctggctaacacggtgaaaccccggctctactaaaaaatacaaaaaattagccgggtgtggtggcagacacctgtggtcccagctattcgggaggctga

SEQ ID NO: 789 - DNA, 201 bp, Homo sapiens
aggttaaaatggaaaatcccgccagacagtgcaccaaaggctgtcccgccctgaaatgcaatcagagctgggttttcccaatccacagatgtggacctgtyggagaaccagctgggagtggcaggagcccaggccctctgtgccgccctcacagtgaaccaggccatgcggaagatgcagctgtcagggaatggcctggag

SEQ ID NO: 790 - DNA, 105 bp, Homo sapiens
gaggctgaggcaggaggatggcgtgaacccgggaggcagagcttgcagtgagtcgagattgcaccactgcactccagcctgggcaacagagcgagactacmtctc

SEQ ID NO: 791 - DNA, 201 bp, Homo sapiens
ggagcccaggccctctgtgccgccctcacagtgaaccaggccatgcggaagatgcagctgtcagggaatggcctggaggagcaggcggcccagcaccttgmcgaactcctgctggcccacacagacctgaagtccctggacctgagctacaaccagctgaatgaccaagcagatctgtgcatgggactgcagggcttcctc

SEQ ID NO: 792 - DNA, 201 bp, Homo sapiens
tacccccacatccacctccccctggccacctacgccctggtcatctcagccaagaaggcctaccatgagcagctgtccgtggccaagatcgccagtgcccrcttcgagccagccaatcagatggtcaagtgtgaccctcaccatggcaagtacatggcctgctgcatgttgtacagaggggatgtggtcctgaaagatgtc

SEQ ID NO: 793 - DNA, 201 bp, Homo sapiens
tgaccacctacacgaccctggaacattctgactgtgccttcatagtcgacagcaaagccacctatgacatgtcagcacaacctggacatcgagtgtcccaygtacaccaacctcagtcgtctgggcagatcgtgtcctccatcacggcctccctgtgattcgatggggccctgaatgtgtacttgacagaattccaaacca

SEQ ID NO: 794 - DNA, 201 bp, Homo sapiens
ctcatgaagcggctctcggtggactacgggaagaagtccaagctggagtttgccatttgcccagccccccaggtctccatggccatgacggagccctacarctccatcctgaccacctacacgaccctggaacattctgactgtgccttcatagtcgacagcaaagccacctatgacatgtcagcacaacctggacatcga

SEQ ID NO: 795 - DNA, 143 bp, Homo sapiens
gggtcgcgctctaagtgaggcgccaagcggtctccgcctcagkgtctgaggctgcgaaaggggcgtaacgatgagcggttcctgccagaggtctggggaggataaaaagcaggaggaagaggcgacggcggcctgtggacgtc

SEQ ID NO: 796 - DNA, 201 bp, Homo sapiens; identical to SEQ ID NO: 777

SEQ ID NO: 797 - DNA, 201 bp, Homo sapiens; identical to SEQ ID NO: 778

SEQ ID NO: 798 - DNA, 201 bp, Homo sapiens; identical to SEQ ID NO: 779

SEQ ID NO: 799 - DNA, 201 bp, Homo sapiens; identical to SEQ ID NO: 780

SEQ ID NO: 800 - DNA, 201 bp, Homo sapiens; identical to SEQ ID NO: 781

SEQ ID NO: 801 - DNA, 201 bp, Homo sapiens; identical to SEQ ID NO: 782

SEQ ID NO: 802 - DNA, 201 bp, Homo sapiens; identical to SEQ ID NO: 783

SEQ ID NO: 803 - DNA, 201 bp, Homo sapiens; identical to SEQ ID NO: 784

SEQ ID NO: 804 - DNA, 201 bp, Homo sapiens; identical to SEQ ID NO: 785

SEQ ID NO: 805 - DNA, 201 bp, Homo sapiens; identical to SEQ ID NO: 786

SEQ ID NO: 806 - DNA, 201 bp, Homo sapiens; identical to SEQ ID NO: 787

SEQ ID NO: 807 - DNA, 201 bp, Homo sapiens; identical to SEQ ID NO: 788

SEQ ID NO: 808 - DNA, 201 bp, Homo sapiens
gatccatagcattgtgcccatcttctgctttctgtgccaagggagtgccccagagctgaacctgctgcacggtggcctggggccccagatgtggacctgtyggagaaccagctgggagtggcaggagcccaggccctctgtgccgccctcacagtgaaccaggccatgcggaagatgcagctgtcagggaatggcctggag

SEQ ID NO: 809 - DNA, 201 bp, Homo sapiens
acctgaggtcttgctggatccatagcattgtgcccatcttctgctttctgtgccaagggagtgccccagagctgaacctgctgcacggtggcctggggccscagatgtggacctgttggagaaccagctgggagtggcaggagcccaggccctctgtgccgccctcacagtgaaccaggccatgcggaagatgcagctgtc

SEQ ID NO: 810 - DNA, 105 bp, Homo sapiens; identical to SEQ ID NO: 790

SEQ ID NO: 811 - DNA, 201 bp, Homo sapiens; identical to SEQ ID NO: 791

SEQ ID NO: 812 - DNA, 201 bp, Homo sapiens
aggaggttaaaatggaaaatcccgccagacagtgcaccaaaggctgtcccgccctgaaatgcaatcagagctgggttttcccaatccacaggcacccatgsacttggagaactggtcggggacaccctgtacctgaggtcttgctggatccatagcattgtgcccatcttctgctttctgtgccaagggagtgccccagag

SEQ ID NO: 813 - DNA, 201 bp, Homo sapiens; identical to SEQ ID NO: 792

SEQ ID NO: 814 - DNA, 201 bp, Homo sapiens; identical to SEQ ID NO: 793

SEQ ID NO: 815 - DNA, 201 bp, Homo sapiens; identical to SEQ ID NO: 794

SEQ ID NO: 816 - DNA, 143 bp, Homo sapiens; identical to SEQ ID NO: 795

SEQ ID NO: 817 - DNA, 201 bp, Homo sapiens
gggcagtctcctcagtaatctaggattcaatgacaggaagtgaataagaagataacagtgtttcaaatgccgtgaaacatggcatcatgctctaacttcartataccaataaaacaatcagcttgcaatttctgctggtggtgtctctttctgagtgtttgggactctagaatctgagacccatgttcacattgtaagaat

SEQ ID NO: 818 - DNA, 201 bp, Homo sapiens
gtaatctaggattcaatgacaggaagtgaataagaagataacagtgtttcaaatgccgtgaaacatggcatcatgctctaacttcagtataccaataaaayaatcagcttgcaatttctgctggtggtgtctctttctgagtgtttgggactctagaatctgagacccatgttcacattgtaagaatatccaggacccctt

SEQ ID NO: 819 - DNA, 201 bp, Homo sapiens
ggagagccccttgcagaagacgccgtacgagtttctccagcatttggctctaggtgccaagggcacatgtgacaagaaggtgccagctttataaaccttgkaacttcttctgtgtcagttctgagacatacaatttactaaaacacatcatgaaggcctgttttgaagagaaggggaataagactgcatctgttcatatga

SEQ ID NO: 820 - DNA, 201 bp, Homo sapiens
ttctccagcatttggctctaggtgccaagggcacatgtgacaagaaggtgccagctttataaaccttgtaacttcttctgtgtcagttctgagacatacartttactaaaacacatcatgaaggcctgttttgaagagaaggggaataagactgcatctgttcatatgaggttctccagcatttggctcaaggccccaagg

SEQ ID NO: 821 - DNA, 201 bp, Homo sapiens
catacaatttactaaaacacatcatgaaggcctgttttgaagagaaggggaataagactgcatctgttcatatgaggttctccagcatttggctcaaggcyccaagggcacatgtgacaagaaggcgccggctttttaaacattggaagttcttctgtgtcagttctgtgacagaacatttacttaacacatcatgaaggc

SEQ ID NO: 822 - DNA, 147 bp, Homo sapiens
aacggaccctgggagtcggccatcatgctggccccggaggccgttakcttagtcatggctctaaatatgtacctgcaatcggatgttgaggatcaccgagcccgcgacgtagaagtacgggaagttcatgcgcagctgccaggccag

SEQ ID NO: 823 - DNA, 201 bp, Homo sapiens
aagggggccgcccacaaggacctccacaggggcagtctcctcagtaatctaggattcaatgacaggaagtgaataagaagataacagtgtttcaaatgccktgaaacatggcatcatgctctaacttcagtataccaataaaacaatcagcttgcaatttctgctggtggtgtctctttctgagtgtttgggactctagaa

SEQ ID NO: 824 - DNA, 201 bp, Homo sapiens
gcctgttttgaagagaaggggaataagactgcatctgttcatatgaggttctccagcatttggctcaaggccccaagggcacatgtgacaagaaggcgccrgctttttaaacattggaagttcttctgtgtcagttctgtgacagaacatttacttaacacatcatgaaggctagtttggatgtggaggggaatagactcc

SEQ ID NO: 825 - DNA, 201 bp, Homo sapiens; identical to SEQ ID NO: 817

SEQ ID NO: 826 - DNA, 201 bp, Homo sapiens; identical to SEQ ID NO: 818

SEQ ID NO: 827 - DNA, 201 bp, Homo sapiens
catgcgcagctgccaggccagctcgaagaaggcgagcagggtgcgggagagccccttgcagaagacgccgtacgaggttctccagcatttggctcaaggcyccaagggcacatgtgacaagaaggcgccggctttttaaacattggaagttcttctgtgtcagttctgtgacagaacatttacttaacacatcatgaaggc

SEQ ID NO: 828 - DNA, 147 bp, Homo sapiens; identical to SEQ ID NO: 822

SEQ ID NO: 829 - DNA, 201 bp, Homo sapiens; identical to SEQ ID NO: 823

SEQ ID NO: 830 - DNA, 201 bp, Homo sapiens
aggcgagcagggtgcgggagagccccttgcagaagacgccgtacgaggttctccagcatttggctcaaggccccaagggcacatgtgacaagaaggcgccrgctttttaaacattggaagttcttctgtgtcagttctgtgacagaacatttacttaacacatcatgaaggctagtttggatgtggaggggaatagactcc

SEQ ID NO: 831 - DNA, 201 bp, Homo sapiens; identical to SEQ ID NO: 817

SEQ ID NO: 832 - DNA, 201 bp, Homo sapiens; identical to SEQ ID NO: 818

SEQ ID NO: 833 - DNA, 201 bp, Homo sapiens; identical to SEQ ID NO: 819

SEQ ID NO: 834 - DNA, 201 bp, Homo sapiens; identical to SEQ ID NO: 820

SEQ ID NO: 835 - DNA, 201 bp, Homo sapiens; identical to SEQ ID NO: 821

SEQ ID NO: 836 - DNA, 147 bp, Homo sapiens; identical to SEQ ID NO: 822

SEQ ID NO: 837 - DNA, 201 bp, Homo sapiens; identical to SEQ ID NO: 823

SEQ ID NO: 838 - DNA, 201 bp, Homo sapiens; identical to SEQ ID NO: 824

SEQ ID NO: 839 - DNA, 201 bp, Homo sapiens; identical to SEQ ID NO: 817

SEQ ID NO: 840 - DNA, 201 bp, Homo sapiens; identical to SEQ ID NO: 818

SEQ ID NO: 841 - DNA, 201 bp, Homo sapiens; identical to SEQ ID NO: 827

SEQ ID NO: 842 - DNA, 147 bp, Homo sapiens; identical to SEQ ID NO: 822

SEQ ID NO: 843 - DNA, 201 bp, Homo sapiens; identical to SEQ ID NO: 823

SEQ ID NO: 844 - DNA, 201 bp, Homo sapiens; identical to SEQ ID NO: 830

SEQ ID NO: 845 - DNA, 201 bp, Homo sapiens
acatctcaagaagatgcagctccatggcaaaggatctcaagatcccagtaccaaggtccacataaaagttttgcaaactgtgatctccttcttcttgttaygtgccatttactttgtgtctgtaataatatcagtttggagttttaagaatctggaaaacaaacctgtcttcatgttctgccaagctattggattcagctg

SEQ ID NO: 846 - DNA, 201 bp, Homo sapiens
tgctactagcctcagcatattttatttgctcaagattgccaatttctccaaccttatttttcttcgcttaaagaggagagttaagagtgtcattctggtgrtgctgttggggcctttgctatttttggcttgtcatctttttgtggtaaacatgaatcagattgtatggacaaaagaatatgaaggaaacatgacttggaa

SEQ ID NO: 847 - DNA, 201 bp, Homo sapiens
tttgctgaccaaattgtcactgctctggcggtctccagagttggtttgctctgggtgttattattaaattggtattcaactgtgttgaatccagctttttrtagtgtagaattaagaactactgcttataatatctgggcagtaaccggccatttcagcaactggcctgctactagcctcagcatattttatttgctcaag

SEQ ID NO: 848 - DNA, 101 bp, Homo sapiens
ttggattcagctgttcttcagcccacccgttcatcctgatttggggaaacaagaagctaaagcagacttatctttcagttttgtggcaaatgaggtactgr

SEQ ID NO: 849 - DNA, 108 bp, Homo sapiens
caagctattggattcagctgttcttcagcccacccgttcatcctgatttggggaaacaagaagctaaagcagacttatctttcagttttgtggcaaatgasgtactga

SEQ ID NO: 850 - DNA, 201 bp, Homo sapiens
tctgtgtaaacatctcaagaagatgcagctccatggcaaaggatctcaagatcccagtaccaaggtccacataaaagttttgcaaactgtgatctccttcytcttgttatgtgccatttactttgtgtctgtaataatatcagtttggagttttaagaatctggaaaacaaacctgtcttcatgttctgccaagctattgg

SEQ ID NO: 851 - DNA, 201 bp, Homo sapiens
caaagttcaagcgatatgagtctcatccagtctgtgctgatctgcaggccaaaattcttcagtgttaccgtgagaacacccaccagaccctcaaatgctcygctctggccacccagtatatgcactgtgtcaatcatgccaaacagagcatgcttgagaagggaggataaaaactttcagaatgagcaaaacaccatcaac

SEQ ID NO: 852 - DNA, 201 bp, Homo sapiens; identical to SEQ ID NO: 851

SEQ ID NO: 853 - DNA, 201 bp, Homo sapiens
ccgggtcgggtgaaccaatccgggcgccctcgccgaacagaggcgggcagttcgcatcgccgaccaacctgaggcgtttttgttgtggcgcgtgaccggargaggcgggagctcaggaccggcgccttctccttgcttctgggggtcgtggccttgctcccgctgtgcgggaaaagaatccaggcccttccacgcgcgtgt

SEQ ID NO: 854 - DNA, 201 bp, Homo sapiens
gaagcccaaatggggagtcctcgtcaccagacagtgggtacctgtctcctaaaaatcagccgtcagccctgctgagtgcctcagccagccagagccctatrgaagaccaaggggagatggaaagagaggtcaagtcccctggggccaggcattgctaccaggacaaccaggacttggcagtgccacacaaccgcaagtctc

SEQ ID NO: 855 - DNA, 201 bp, Homo sapiens
gaccgcacttatatgcattgctaatatggaatttaagataccatacacagtctctcatggacctatctctattgtagaattatgacttatgtcttacttgscaaatttttctgaatgtgacctttttttgctgatttgctgggtttgggattaactagcattattttgccacctttatattgtatttataaaaaaaaaagt

SEQ ID NO: 856 - DNA, 201 bp, Homo sapiens
caaatggggagtcctcgtcaccagacagtgggtacctgtctcctaaaaatcagccgtcagccctgctgagtgcctcagccagccagagccctatggaagaycaaggggagatggaaagagaggtcaagtcccctggggccaggcattgctaccaggacaaccaggacttggcagtgccacacaaccgcaagtctcacccac

SEQ ID NO: 857 - DNA, 201 bp, Homo sapiens
gatgctgttattcaagacctggaacgaaaacttcgcttcaaggaggacctcctgaacaatggccagccgaggttaacatacgaagaaagaatggctcgtcractgctaggtgctgacagtgcaactgtctttaatattcaggagccagaagaggaaacagctaatcaggaatacaaagtctccagctgtgaacagagactc

SEQ ID NO: 858 - DNA, 201 bp, Homo sapiens
gcctttctgctttcctcagccaggaagagataaacaagagtcttgacctggcccggagagccatagccgactccgaaacagaagattttgactcggaaaargagatctcgcagattttcagtacttctcctgcaagcctctgtgaacatccttcccataaggagaccaaattgggtgaacacgcctcgaggagacctcagg

SEQ ID NO: 859 - DNA, 151 bp, Homo sapiens
gtgaccacggaccaggcagtctctaatgaataggcaaggccacaacctccwttctcccagaaaagaagaaatgctcatctgaaattcatcacctctctggagtcttcaaactgaccaagcattgaaaagaacacagtttcagaaaacagtt

SEQ ID NO: 860 - DNA, 201 bp, Homo sapiens
agaagcccaaatggggagtcctcgtcaccagacagtgggtacctgtctcctaaaaatcagccgtcagccctgctgagtgcctcagccagccagagccctayggaagaccaaggggagatggaaagagaggtcaagtcccctggggccaggcattgctaccaggacaaccaggacttggcagtgccacacaaccgcaagtct

SEQ ID NO: 861 - DNA, 180 bp, Homo sapiens
tggcaaatttttctgaatgtgacctttttttgctgatttgctgggtttgggattaactagcattattttgccacctttatattgtatttataaaaaaaaaagtactatcaatcaatcatactactttggattgttgtgctggtgtaatgtggatttaacatcaataaatatttgacaaat

SEQ ID NO: 862 - DNA, 201 bp, Homo sapiens
tagatgatgatgggaattatacaattatggctgcaaaccctcagggccgcatcagttgtactggacggctaatggtacaggctgtcaaccaaagaggtcgragtccccggtctccctcaggccatcctcatgtcagaaggcctcgttctagatcaagggacagtggagacgaaaatgaaccaattcaggagcgattcttca

SEQ ID NO: 863 - DNA, 201 bp, Homo sapiens
gtgaaccaagtgcaatatgtaaggatgaaagaagaagagatgacaaagaaatccaagtaaatgccttgtctttgcaaatgtttttatattaaatcataagggaaggaactacttgccttaaatgttaatatcaaaagagttttctaacaaggttaataccttagttcttaacattttttttctttatgtgtagtgttttca

SEQ ID NO: 864 - DNA, 201 bp, Homo sapiens
atctgtgtaccaccccatatatttcatattactgtttcacatgtacagctttctacttctttgtaagaacaccaaccaaccaaggtttaagtgattaatargcttgagcaccgggtggcagatgttctatgcagtgtggttcaagtttctttgaccgcacttatatgcattgctaatatggaatttaagataccatacaca

SEQ ID NO: 865 - DNA, 201 bp, Homo sapiens
tcagggccttgtccagctgagagcttcatgtccaccagattctgagaggtgtcagcagcactttttttttttatttgttgtttgttttccatgaggttatyggaccatgggctgagctcaggcactttctgtaggagactgttatttctgtaaagatggttatttaaccctcctccaccccatcacggtggccctgagggc

SEQ ID NO: 866 - DNA, 201 bp, Homo sapiens
ttttctgggacaacagaatgactcagaccaagatggataggatggttagggctttgcttcttgctgtttttctttgaagctagttcattgtcctgcaggtmccttcatcttccatacctagcccactcttttagcccttaccttaaatctctcagataagttggttcacaaagaatgttaagtactgaatcatgtgtgact

SEQ ID NO: 867 - DNA, 201 bp, Homo sapiens
ttctgtaggagactgttatttctgtaaagatggttatttaaccctcctccaccccatcacggtggccctgagggctgacccggaggccagtggagctgccwggtgtccacgggggagggccaaggcctgctgagctgattctccagctgctgccccagcctttccgccttgcacagcacagaggtggtcaccccagggaca

SEQ ID NO: 868 - DNA, 201 bp, Homo sapiens
ttaatgcctgtggagggactggagctgctggatcccagtgtggtggtgtaggaggccacagtgagcaggtggccccagctgggtttcccaggtcaggaatrtgggccccaggcaaggtgcagcctttgctcacagctccatccatgtctagaccttcaggccagtctgcagatgaggttccctacctttttcttctcttca

SEQ ID NO: 869 - DNA, 201 bp, Homo sapiens
tgaaggtgtttttttctttatttctttttctttttttttttttttctttttcttttttttttgcacatgacagtgtttgtattgaggaccttccaaggaaragggatgctgtagcagtggtgcctgggtgcctggcctccagtgtcccacctccttcaccaccccacttggctcctttgccatcttgatgctgaggtttcc

SEQ ID NO: 870 - DNA, 201 bp, Homo sapiens
tgaacaagagggtacaggacctgagtgctggtggccagggctccctcactgacagtggccctgagaggaggccagaggggcctggggctcaagcacccagstcccccagggtcacagaagcgccttgctacccaggagcaccgagcacagaagcatcaggccagactgggcctcaagagcccacctccgccagggcctaga

SEQ ID NO: 871 - DNA, 201 bp, Homo sapiens
cagctgctgccccagcctttccgccttgcacagcacagaggtggtcaccccagggacagccaggcacctgctcctcttgcccttcctgggggaagggagckgccttctgtccctgtaactgctttccttatggcccagcccggccactcagacttgtttgaagctgcactggcagcttttttgtctcctttgggtattcac

SEQ ID NO: 872 - DNA, 201 bp, Homo sapiens
cacggtggccctgagggctgacccggaggccagtggagctgcctggtgtccacgggggagggccaaggcctgctgagctgattctccagctgctgccccakcctttccgccttgcacagcacagaggtggtcaccccagggacagccaggcacctgctcctcttgcccttcctgggggaagggagctgccttctgtccctg

SEQ ID NO: 873 - DNA, 201 bp, Homo sapiens
agaggtatgcaccttcccccttgaagagaggggaaaggcctacagtggcccacataattgcctgactcacacttcagctacctcttaatgcctgtggaggractggagctgctggatcccagtgtggtggtgtaggaggccacagtgagcaggtggccccagctgggtttcccaggtcaggaatgtgggccccaggcaagg

SEQ ID NO: 874 - DNA, 201 bp, Homo sapiens; identical to SEQ ID NO: 865

SEQ ID NO: 875 - DNA, 201 bp, Homo sapiens; identical to SEQ ID NO: 866

SEQ ID NO: 876 - DNA, 201 bp, Homo sapiens; identical to SEQ ID NO: 867

SEQ ID NO: 877 - DNA, 201 bp, Homo sapiens; identical to SEQ ID NO: 868

SEQ ID NO: 878 - DNA, 201 bp, Homo sapiens
ccgccaagaccagagagccgttggcgccctccgcccgggcctgccggtccgtttattttaagaagctttgtgcgcctgctgtggggatttctgatccaggytgcgaagaatttcgaagtctggaaaatagcaactgtgtttgtttctaaaggatcttctcctgacccagcatcgctcatcacaatgaagaaccaagacaaa

SEQ ID NO: 879 - DNA, 201 bp, Homo sapiens; identical to SEQ ID NO: 869

SEQ ID NO: 880 - DNA, 201 bp, Homo sapiens; identical to SEQ ID NO: 870

SEQ ID NO: 881 - DNA, 201 bp, Homo sapiens; identical to SEQ ID NO: 871

SEQ ID NO: 882 - DNA, 201 bp, Homo sapiens; identical to SEQ ID NO: 872

SEQ ID NO: 883 - DNA, 201 bp, Homo sapiens; identical to SEQ ID NO: 873

SEQ ID NO: 884 - DNA, 201 bp, Homo sapiens
gttttcaggattaaaagcagccactattagaaagaacaaaaatacatttgacataaatataaggagcctcaatagaacctcctgtacccagtcattgtcamtgccacatccattcattcaccagcccttatatcaatgcttgctgggctcacttaccacgatcagcacgtgcatgtccttacctgaaagcttgccactcaa

SEQ ID NO: 885 - DNA, 201 bp, Homo sapiens
gtcgcctcaagtagtgtatgcatgaactcaagcattaaattagaattgattttttaaaaaactcacacaaacagatgtattatttaaaaatctttaaagcrggtttaaacagttttcaggattaaaagcagccactattagaaagaacaaaaatacatttgacataaatataaggagcctcaatagaacctcctgtaccca

SEQ ID NO: 886 - DNA, 101 bp, Homo sapiens
actgcccacattagggcttttatgttagggtgaagttaccttgcattgtcatataagcaattgctatttgtggtgtcttgcaaataaacctattctgatck

SEQ ID NO: 887 - DNA, 201 bp, Homo sapiens
cgagtttccacggtagttttaagcaccattgcccgtggtaatggctgacattgatactgcactttttttttatttaagatggagttcccctctgccacccrgactggagtacagtggcgcgatcctggccatcgcaacctccgcctcccagatccctcctacaacacatgagaattgtgggtgctacaattcaagatgaga

SEQ ID NO: 888 - DNA, 201 bp, Homo sapiens
ctgtacccagtcattgtcaatgccacatccattcattcaccagcccttatatcaatgcttgctgggctcacttaccacgatcagcacgtgcatgtccttayctgaaagcttgccactcaaatgtgctcagtcttacctgtgtggctgggagtgttggggatttaatgtcaagggaaagaatcttccatcaatgaatgatga

SEQ ID NO: 889 - DNA, 201 bp, Homo sapiens
gaatgatgaaagttagttttcacaacttccggtccccttggccctcatcaaagggctccaggtgaggtttgggctccttgctatcctccgagtttccacgrtagttttaagcaccattgcccgtggtaatggctgacattgatactgcactttttttttatttaagatggagttcccctctgccacccagactggagtaca

SEQ ID NO: 890 - DNA, 201 bp, Homo sapiens
ccgtggtaatggctgacattgatactgcactttttttttatttaagatggagttcccctctgccacccagactggagtacagtggcgcgatcctggccatygcaacctccgcctcccagatccctcctacaacacatgagaattgtgggtgctacaattcaagatgagatttgagtggggacaaagtcaaaccatatcatt

SEQ ID NO: 891 - DNA, 201 bp, Homo sapiens
tcttggtttccccgctgacagaaagataacaaccctctcaatatcgtgccctcttagagactcatgtctctcggcttccttgcacagccaagacctgaaaytgaaattatccttactatctcaattctttgtcacattctctttccccatccccactcttcaagctacctctgtcaggctgctaccaccaaaacttttctg

SEQ ID NO: 892 - DNA, 201 bp, Homo sapiens
agtctcctaaattatttgctagacacatggctatttggatttaaattaatacaattttaaatttagtgcctcaatacactagccacattttaagttctcartagccacatgtgactagtggctgtcatatgggaaagcacagattattgaacatttgtgtcattgcaagaagttgtttttttctttccctgatacggagtc

SEQ ID NO: 893 - DNA, 201 bp, Homo sapiens
tgtcctaattctatcacctgagctataccaacagtctcctaaattatttgctagacacatggctatttggatttaaattaatacaattttaaatttagtgyctcaatacactagccacattttaagttctcaatagccacatgtgactagtggctgtcatatgggaaagcacagattattgaacatttgtgtcattgcaag

SEQ ID NO: 894 - DNA, 201 bp, Homo sapiens
gccaccacacccggctagtgtctgtatttttagtagacacggggtttcaccatgttggccaaattagtctcgaattcctgacctcgtgatccgcccgcctyagcctcccaaagtgctgggattacaggcgtgagccactgcgcgcggcctcattacaagaagttctgttggacagtgctgctttagactttcctctctgcc

SEQ ID NO: 895 - DNA, 201 bp, Homo sapiens
caaccctctcaatatcgtgccctcttagagactcatgtctctcggcttccttgcacagccaagacctgaaattgaaattatccttactatctcaattcttkgtcacattctctttccccatccccactcttcaagctacctctgtcaggctgctaccaccaaaacttttctggcagatgtcaccaagaacctcctaactgg

SEQ ID NO: 896 - DNA, 201 bp, Homo sapiens
ccaccacacccggctagtgtctgtatttttagtagacacggggtttcaccatgttggccaaattagtctcgaattcctgacctcgtgatccgcccgcctcrgcctcccaaagtgctgggattacaggcgtgagccactgcgcgcggcctcattacaagaagttctgttggacagtgctgctttagactttcctctctgcct

SEQ ID NO: 897 - DNA, 201 bp, Homo sapiens
gtaagacaaagaacttactaccagaagatgaaatgatcggaaaaattatcaaacatctgaagatggttgtttccactttggaagaaacctatggacattgygatcagaatggagaagaaccatttgtaaagcatgaacatgaagaattatctttatctgttggggatgatatgaattcattcttgacatattgttcgcaat

SEQ ID NO: 898 - DNA, 201 bp, Homo sapiens
aagttacttaaaagtgaggggaaaactgagacaacaatgcaagtgggtaatagtcaaacaaaagttaaaggtgaagattcaaaaaatataccattggagamagaaacaagaaaatcactggtttcagattcaggtggacaaaggacaagtgataaaatccaagaatatccacagatcactgcccaaagcggaagactgatt

SEQ ID NO: 899 - DNA, 201 bp, Homo sapiens
cctacgtcccctgccaacccctgccgctctcctctattttgtacactttatcattaaaggatttgaaatgaatggaggaataagtttttttcatctgtaayttggaagccaagtcagtaacaaaatgaaaccagtaaagcatctgttgaccaccagtaacaaatcggcaaatgttccagcattaactactaaaaaaggact

SEQ ID NO: 900 - DNA, 201 bp, Homo sapiens
gggaggacgcagcattctcctgtttcctgtctcctaagaccaatgcagaggccatggaagtgcggttcttcaggggccagttctctagcgtggtccacctrtacagggacgggaaggaccagccatttatgcagatgccacagtatcaaggcaggacaaaactggtgaaggattctattgcggaggggcgcatctctctga

SEQ ID NO: 901 - DNA, 201 bp, Homo sapiens
tggcctctatgggtgcaggattagttcccagtcttactaccagaaggccatctgggagctacaggtgtcagcactgggctcagttcctctcatttccatcrcgggatatgttgatagagacatccagctactctgtcagtcctcgggctggttcccccggcccacagcgaagtggaaaggtccacaaggacaggatttgtc

SEQ ID NO: 902 - DNA, 201 bp, Homo sapiens
gcattctcctgtttcctgtctcctaagaccaatgcagaggccatggaagtgcggttcttcaggggccagttctctagcgtggtccacctctacagggacgrgaaggaccagccatttatgcagatgccacagtatcaaggcaggacaaaactggtgaaggattctattgcggaggggcgcatctctctgaggctggaaaac

SEQ ID NO: 903 - DNA, 201 bp, Homo sapiens
tgtatttcacattaaatccccgttttatcagcgtcttccccaggaccccacctacaaaaataggggtcttcctggactatgagtgtgggaccatctccttyttcaacataaatgaccagtcccttatttataccctgacatgtcggtttgaaggcttattgaggccctacattgagtatccgtcctataatgagcaaaatg

SEQ ID NO: 904 - DNA, 201 bp, Homo sapiens
gcatggcctgtttgatgtggagatctctctgaccgtccaagagaacgccgggagcatatcctgttccatgcggcatgctcatctgagccgagaggtggaarccagggtacagataggagatacctttttcgagcctatatcgtggcacctggctaccaaagtactgggaatactctgctgtggcctattttttggcattgt

SEQ ID NO: 905 - DNA, 201 bp, Homo sapiens
agcctgtccaggccttggtgggggaggacgcagcattctcctgtttcctgtctcctaagaccaatgcagaggccatggaagtgcggttcttcaggggccayttctctagcgtggtccacctctacagggacgggaaggaccagccatttatgcagatgccacagtatcaaggcaggacaaaactggtgaaggattctattg

SEQ ID NO: 906 - DNA, 201 bp, Homo sapiens; identical to SEQ ID NO: 901

SEQ ID NO: 907 - DNA, 201 bp, Homo sapiens
ttgatgtggagatctctctgaccgtccaagagaacgccgggagcatatcctgttccatgcggcatgctcatctgagccgagaggtggaatccagggtacarataggagatacctttttcgagcctatatcgtggcacctggctaccaaagtactgggaatactctgctgtggcctattttttggcattgttggactgaaga

SEQ ID NO: 908 - DNA, 201 bp, Homo sapiens
aactggactggagaagaaagcacggacaggcagaattgagagacgcccggaaacacgcagtggaggtgactctggatccagagacggctcacccgaagctktgcgtttctgatctgaaaactgtaacccatagaaaagctccccaggaggtgcctcactctgagaagagatttacaaggaagagtgtggtggcttctcaga

SEQ ID NO: 909 - DNA, 201 bp, Homo sapiens
tcttctctctaatccatccgtcacctctcctgtcatccgtttccatgccgtgaggtccattcacagaacacatccatggctctcatgctcagtttggttckgagtctcctcaagctgggatcagggcagtggcaggtgtttgggccagacaagcctgtccaggccttggtgggggaggacgcagcattctcctgtttcctg

SEQ ID NO: 910 - DNA, 201 bp, Homo sapiens
gcccggaaacacgcagtggaggtgactctggatccagagacggctcacccgaagctctgcgtttctgatctgaaaactgtaacccatagaaaagctccccmggaggtgcctcactctgagaagagatttacaaggaagagtgtggtggcttctcagagtttccaagcagggaaacattactgggaggtggacggaggacac

SEQ ID NO: 911 - DNA, 201 bp, Homo sapiens
ggaactggactggagaagaaagcacggacaggcagaattgagagacgcccggaaacacgcagtggaggtgactctggatccagagacggctcacccgaagstctgcgtttctgatctgaaaactgtaacccatagaaaagctccccaggaggtgcctcactctgagaagagatttacaaggaagagtgtggtggcttctca

SEQ ID NO: 912 - DNA, 201 bp, Homo sapiens
ctctcatgctcagtttggttctgagtctcctcaagctgggatcagggcagtggcaggtgtttgggccagacaagcctgtccaggccttggtgggggaggargcagcattctcctgtttcctgtctcctaagaccaatgcagaggccatggaagtgcggttcttcaggggccagttctctagcgtggtccacctctacaggg

SEQ ID NO: 913 - DNA, 201 bp, Homo sapiens
agaaagtttgaattctgtcttaatgagacagaatgccatacttgagcacctcatcttttgctcaaattgaaatgtcatcgaactgtatttctcaagtcaawggtctgtaaatatgatttatgtattaatctcctaagtgaacaatttatattttatcctctacataattatcgtattatgctttaaatatatatttagttt

SEQ ID NO: 914 - DNA, 117 bp, Homo sapiens
atgaatgatcgtgaatyggggagccctcagaatcacagcagtttcagagatactccaggggtgccttgtgatcagaacgaatttatagacaaaaaaggttctacccatcacctacag

SEQ ID NO: 915 - DNA, 201 bp, Homo sapiens
tgatcaatgatttaaaacttaattcaacaaggagagacgaatatgacaaaattcagattgccgacttgatggaagaaaagttcccaggtgatgctggtttkggcaaactgagaactcttcaaagaaataccaacactgggagaggagaccttgctgaaactcttagaaaagtcaaaagatcatctgctctgggtttagatg

SEQ ID NO: 916 - DNA, 144 bp, Homo sapiens
attccagcaaaaggaaaaacctcatcaaagaagaggaagcagagaaaagtaggtccaactacacctttagcaaccacagacaagaagttcacagctgaagraggagaggagactcctatagctcagcgttttcacacaccatag

SEQ ID NO: 917 - DNA, 201 bp, Homo sapiens
gatcgtgaatcggggagccctcagaatcacagcagtttcagagatactccaggggtgccttgtgatcagaacgaatttatagacaaaaaaggttctacccrtcacctacagataatggtgagtaaatacaagaacaatgttctgctgaaaggattagaagccatcaatgactatcacttcagcataattaattccttactg

SEQ ID NO: 918 - DNA, 201 bp, Homo sapiens
ttgtgatcagaacgaatttatagacaaaaaaggttctacccatcacctacagataatggtgagtaaatacaagaacaatgttctgctgaaaggattagaarccatcaatgactatcacttcagcataattaattccttactgatcaatgatttaaaacttaattcaacaaggagagacgaatatgacaaaattcagattgc

SEQ ID NO: 919 - DNA, 201 bp, Homo sapiens; identical to SEQ ID NO: 884

SEQ ID NO: 920 - DNA, 201 bp, Homo sapiens; identical to SEQ ID NO: 885

SEQ ID NO: 921 - DNA, 101 bp, Homo sapiens
ctgcccacattagggcttttatgttagggtgaagttaccttgcattgtcatataagcaattgctatttgtggtgtcttgcaaataaacctattctgatctk

SEQ ID NO: 922 - DNA, 201 bp, Homo sapiens; identical to SEQ ID NO: 887

SEQ ID NO: 923 - DNA, 201 bp, Homo sapiens; identical to SEQ ID NO: 888

SEQ ID NO: 924 - DNA, 201 bp, Homo sapiens; identical to SEQ ID NO: 889

SEQ ID NO: 925 - DNA, 201 bp, Homo sapiens; identical to SEQ ID NO: 890

SEQ ID NO: 926 - DNA, 108 bp, Homo sapiens
ttcatagcaccttagcttccaggccctccatcccggctgcctctctggcacttgcccttttactgtgcgggtccaaagagacacctatgttcagtttgtcraagtctg

SEQ ID NO: 927 - DNA, 201 bp, Homo sapiens
gtgctttcctctttactcagacacttctagggctggcagggtcagacagtaatcccccactttgtggggaggccctgtttttgctgaacagctcaagggcrggaagattctttcttccacacacccctgcaactgccaatacttgttctgtgtgacccttgcagccatcctatgcggtaggtgctaccattgccatggatc

SEQ ID NO: 928 - DNA, 201 bp, Homo sapiens
acaaaaaccagagcccgcactcactctcgtactggggaggtggacttcagggagggttatctggaggaggaatctctcaaagtacaacacaggagaaagamagtatcgcaatacagaaattttattttttattttattattattttcctgagaccggagtctcgctctgtcgcccaggctggagtgcagtggcgcgatctc

SEQ ID NO: 929 - DNA, 201 bp, Homo sapiens
  misc_feature (1)...(201): n = A,T,C or G, or insertion/deletion polymorphism (see Tables 1-2)
atgaacacgcatcacactttgaagcagagaaaagcagacaatacagatctatgcacaaatcaccacgcacacttcacagtaagacgttgcagaggtctagnaaggctggtttgaagaaatacacagaagaaaaacggatggactaaccagagcgctcagccagcctgctggactggcacccgtggctacagacactcttgt

SEQ ID NO: 930 - DNA, 201 bp, Homo sapiens
gccgtgatggaggacacgatctgcccagacgactgaggttggtgtacgtgggacactcgatgtccaggttgtgctgacatgtcataggtggctttgctgtygactatgaaggcacagtcagaatgttccagggtcgtgtaggtggtcaggatggagttgtagggctccgtcatggccatggagacctggggggctgggcaa

SEQ ID NO: 931 - DNA, 201 bp, Homo sapiens
ctgagatgaccagggcgtaggtggccagggggaggtggatgtgggggtatggcaccaagttggtttggaattctgtcaagtacacattcagggccccatcraatcacagggaggccgtgatggaggacacgatctgcccagacgactgaggttggtgtacgtgggacactcgatgtccaggttgtgctgacatgtcatagg

SEQ ID NO: 932 - DNA, 201 bp, Homo sapiens
gggcactggcgatcttggccacggacagctgctcatggtaggccttcttggctgagatgaccagggcgtaggtggccagggggaggtggatgtgggggtayggcaccaagttggtttggaattctgtcaagtacacattcagggccccatcgaatcacagggaggccgtgatggaggacacgatctgcccagacgactgag

SEQ ID NO: 933 - DNA, 201 bp, Homo sapiens
cgagagccgcttcatgagcagagacacgaacccagagccagtgccgcccccaaagctgtggaagatgaggaagccctgcagtcccatgcacagatctgccygagagaaaccagacaacgtaagccaatgcccgtgggagccacaccaccaacctccaccaagccggggccacttctctttgcctctgagagttgatacgga

SEQ ID NO: 934 - DNA, 201 bp, Homo sapiens
cctgggagcctcgaaagccgcaggggcggcagctcgcctcggaatgacctctgacggaagaaataaaacggggcctgggacgcttgcacgaaagaacccgmcaaaaaccagagcccgcactcactctcgtactggggaggtggacttcagggagggttatctggaggaggaatctctcaaagtacaacacaggagaaagac

SEQ ID NO: 935 - DNA, 201 bp, Homo sapiens
ggcccgggagcggaaagcggcagtgtcctgggagcctcgaaagccgcaggggcggcagctcgcctcggaatgacctctgacggaagaaataaaacggggcmtgggacgcttgcacgaaagaacccgacaaaaaccagagcccgcactcactctcgtactggggaggtggacttcagggagggttatctggaggaggaatct

SEQ ID NO: 936 - DNA, 201 bp, Homo sapiens
gcggccccagcgttcgggagcggcccgggagcggaaagcggcagtgtcctgggagcctcgaaagccgcaggggcggcagctcgcctcggaatgacctctgwcggaagaaataaaacggggcctgggacgcttgcacgaaagaacccgacaaaaaccagagcccgcactcactctcgtactggggaggtggacttcagggag

SEQ ID NO: 937 - DNA, 201 bp, Homo sapiens
tctccgtaaacaccccggcacgatggagcggccccagcgttcgggagcggcccgggagcggaaagcggcagtgtcctgggagcctcgaaagccgcaggggsggcagctcgcctcggaatgacctctgacggaagaaataaaacggggcctgggacgcttgcacgaaagaacccgacaaaaaccagagcccgcactcactct

SEQ ID NO: 938 - DNA, 201 bp, Homo sapiens
cccgggttcacgccattcggctgcctcaccctccacagtagctgggactacaagcgcccgccaccacgcccggctaatttgcaatacggaaattttaatarctgacgtgaaaaggggttgtctccataaaggatgcgggccttcaggggcagcattattctgcaggtctcctgcttcctgatggcacaaggactccacatc

SEQ ID NO: 939 - DNA, 201 bp, Homo sapiens
gggttatctggaggaggaatctctcaaagtacaacacaggagaaagacagtatcgcaatacagaaattttattttttattttattattattttcctgagamcggagtctcgctctgtcgcccaggctggagtgcagtggcgcgatctcggctcactgcaaactccgcctcccgggttcacgccattcggctgcctcaccct

SEQ ID NO: 940 - DNA, 201 bp, Homo sapiens
tactggggaggtggacttcagggagggttatctggaggaggaatctctcaaagtacaacacaggagaaagacagtatcgcaatacagaaattttatttttwattttattattattttcctgagaccggagtctcgctctgtcgcccaggctggagtgcagtggcgcgatctcggctcactgcaaactccgcctcccgggtt

SEQ ID NO: 941 - DNA, 201 bp, Homo sapiens
gtcacacttgaccatctgattggctggctcgaagcgggcactggcgatcttggccacggacagctgctcatggtaggccttcttggctgagatgaccaggrcgtaggtggccagggggaggtggatgtgggggtatggcaccaagttggtttggaattctgtcaagtacacattcagggccccatcgaatcacagggaggc

SEQ ID NO: 942 - DNA, 201 bp, Homo sapiens
gcagctcgcctcggaatgacctctgacggaagaaataaaacggggcctgggacgcttgcacgaaagaacccgacaaaaaccagagcccgcactcactctcrtactggggaggtggacttcagggagggttatctggaggaggaatctctcaaagtacaacacaggagaaagacagtatcgcaatacagaaattttattttt

SEQ ID NO: 943 - DNA, 201 bp, Homo sapiens
ctcttgatggtggcgacagccgcactgacatctttcaggaccacatcccctctgtacaacatgcagcaggccatgtacttgccatggtgagggtcacactwgaccatctgattggctggctcgaagcgggcactggcgatcttggccacggacagctgctcatggtaggccttcttggctgagatgaccagggcgtaggtg

SEQ ID NO: 944 - DNA, 201 bp, Homo sapiens
acaccagtccacaaactggttggtgtgcttgctcttgatggtggcgacagccgcactgacatctttcaggaccacatcccctctgtacaacatgcagcagsccatgtacttgccatggtgagggtcacacttgaccatctgattggctggctcgaagcgggcactggcgatcttggccacggacagctgctcatggtaggc

SEQ ID NO: 945 - DNA, 201 bp, Homo sapiens
tgagagttgatacggattcagaccatccataatgaacacgcatcacactttgaagcagagaaaagcagacaatacagatctatgcacaaatcaccacgcayacttcacagtaagacgttgcagaggtctaggaaggctggtttgaagaaatacacagaagaaaaacggatggactaaccagagcgctcagccagcctgctg

SEQ ID NO: 946 - DNA, 201 bp, Homo sapiens
cttcatgagcagagacacgaacccagagccagtgccgcccccaaagctgtggaagatgaggaagccctgcagtcccatgcacagatctgcctgagagaaaycagacaacgtaagccaatgcccgtgggagccacaccaccaacctccaccaagccggggccacttctctttgcctctgagagttgatacggattcagacca

SEQ ID NO: 947 - DNA, 201 bp, Homo sapiens
gacatctttcaggaccacatcccctctgtacaacatgcagcaggccatgtacttgccatggtgagggtcacacttgaccatctgattggctggctcgaagygggcactggcgatcttggccacggacagctgctcatggtaggccttcttggctgagatgaccagggcgtaggtggccagggggaggtggatgtgggggta

SEQ ID NO: 948 - DNA, 201 bp, Homo sapiens
tggtttggaattctgtcaagtacacattcagggccccatcgaatcacagggaggccgtgatggaggacacgatctgcccagacgactgaggttggtgtacrtgggacactcgatgtccaggttgtgctgacatgtcataggtggctttgctgtcgactatgaaggcacagtcagaatgttccagggtcgtgtaggtggtca

SEQ ID NO: 949 - DNA, 201 bp, Homo sapiens
tcgatgtccaggttgtgctgacatgtcataggtggctttgctgtcgactatgaaggcacagtcagaatgttccagggtcgtgtaggtggtcaggatggagytgtagggctccgtcatggccatggagacctggggggctgggcaaatggcaaactccagcttggacttcttcccgtagtccaccgagagccgcttcatgag

SEQ ID NO: 950 - DNA, 201 bp, Homo sapiens
ccagagccagtgccgcccccaaagctgtggaagatgaggaagccctgcagtcccatgcacagatctgcctgagagaaaccagacaacgtaagccaatgccygtgggagccacaccaccaacctccaccaagccggggccacttctctttgcctctgagagttgatacggattcagaccatccataatgaacacgcatcaca

SEQ ID NO: 951 - DNA, 201 bp, Homo sapiens
tacatgtgctttcctctttactcagacacttctagggctggcagggtcagacagtaatcccccactttgtggggaggccctgtttttgctgaacagctcargggcaggaagattctttcttccacacacccctgcaactgccaatacttgttctgtgtgacccttgcagccatcctatgcggtaggtgctaccattgccat

SEQ ID NO: 952 - DNA, 201 bp, Homo sapiens
tctgtgtgacccttgcagccatcctatgcggtaggtgctaccattgccatggatcaagtggggacgcacagatccaagctccttcacctctcaagggagtkgggccctcccacagatctcttggaggaaaaaaatggccttgctgggcctgtcgatttccagtccccacccacctccctcatgtacatgtgtctgtttgtg

SEQ ID NO: 953 - DNA, 201 bp, Homo sapiens
gcttactaatatctggacagtgatcaatcattttagtgtctggttagctacaggcctcggtactttttattttctcaagatagccaatttttctaactctrtttttctctacctaaagtggagggttaaaaaggtggttttggtgctgcttcttgtgacttcggtcttcttgtttttaaatattgcactgataaacatcca

SEQ ID NO: 954 - DNA, 201 bp, Homo sapiens
tgattcaagtaactttacacgattttccagtcttattgtattaaccagcactgtgttcattttcataccctttactttgtccctggcaatgtttcttctcytcatcttctccatgtggaaacatcgcaagaagatgcagcacactgtcaaaatatccggagacgccagcaccaaagcccacagaggagttaaaagtgtgat

SEQ ID NO: 955 - DNA, 171 bp, Homo sapiens
tgatcgtaactgctgtctttgcaaatggagtgttttctagtgttttaacaataaacgtaatactgactctagctttgagataaattcttttaaaaatattmttcagggagaatatttgtttcctatcttcctgtgtatagtattgtaataaaatctctgttaaaaactatc

SEQ ID NO: 956 - DNA, 201 bp, Homo sapiens
tagataaagtacataaaagaatatggaattttagtacctatattaagtgtttttaatttttgtataatatttagtacctgattagcgtgtatgcaaaaaastaatttgcttcgtttgttgaattagaagccagctgccttactaaactaccacatttgctttgctcattctcttggctttgcagatagaaaattatatcat

SEQ ID NO: 957 - DNA, 109 bp, Homo sapiens
tgcattaaraagtcttcagcagtgatattagacattggggcatgctcttacaggcaatgggtggtgtcataaagagcatatttacattcgttttaattgtggaatttat

SEQ ID NO: 958 - DNA, 201 bp, Homo sapiens
cacagttactaaaaataggcttcttaaacttacatctcaatctggtagataaagtacataaaagaatatggaattttagtacctatattaagtgtttttawtttttgtataatatttagtacctgattagcgtgtatgcaaaaaagtaatttgcttcgtttgttgaattagaagccagctgccttactaaactaccacatt

SEQ ID NO: 959 - DNA, 201 bp, Homo sapiens
taaagagcatatttacattcgttttaattgtggaatttataattggaaatttaggaaatagtttcatagcactggtgaactgtattgactgggtcaagggwagaaagatctcttcggttgatcggatcctcactgctttggcaatctctcgaattagcctggtttggttaatattcggaagctggtgtgtgtctgtgtttt

SEQ ID NO: 960 - DNA, 201 bp, Homo sapiens
tagaaaaaaaatagctcctaagaaattcttgtatgttatataaatttatacttccttaagattctttcattgtgtataactttgtgaattttacaaagatrtgcttggaatcaacaccatccaaacatatcacaaattaggatatatgaaagtatgtatattaccatacagagaagaatgcgaatactataaagagttctt

SEQ ID NO: 961 - DNA, 201 bp, Homo sapiens
tcaatcattttagtgtctggttagctacaggcctcggtactttttattttctcaagatagccaatttttctaactctatttttctctacctaaagtggagrgttaaaaaggtggttttggtgctgcttcttgtgacttcggtcttcttgtttttaaatattgcactgataaacatccatataaatgccagtatcaatggat

SEQ ID NO: 962 - DNA, 201 bp, Homo sapiens
tttgctcaagattgccaatttctccaaccttatttctctccacctaaagaagagaattaagagtgttgttctggtgatactgttggggcccttggtatttytgatttgtaatcttgctgtgataaccatggatgagagagtgtggacaaaagaatatgaaggaaatgtgacttggaagatcaaattgaggaatgcaataca

SEQ ID NO: 963 - DNA, 184 bp, Homo sapiens
atgatgtgttttctgctcatcatttcatcaattctggtagtgtttgcatttgttcttggaaatgttgccaatggcttcatagcyctagtaaatgtcattgactgggttaacacacgaaagatctcctcagctgagcaaattctcactgctctggtggtctccagaattggtttactctgggtca

SEQ ID NO: 964 - DNA, 201 bp, Homo sapiens
tctgctttatatggtttagaagtaagaattgttgcttctaatgcctgggctgtaacgaaccatttcagcatgtggcttgctgctagcctcagcatattttrtttgctcaagattgccaatttctccaaccttatttctctccacctaaagaagagaattaagagtgttgttctggtgatactgttggggcccttggtattt

SEQ ID NO: 965 - DNA, 201 bp, Homo sapiens
ccatttcagcatgtggcttgctgctagcctcagcatattttgtttgctcaagattgccaatttctccaaccttatttctctccacctaaagaagagaattmagagtgttgttctggtgatactgttggggcccttggtatttttgatttgtaatcttgctgtgataaccatggatgagagagtgtggacaaaagaatatga

SEQ ID NO: 966 - DNA, 106 bp, Homo sapiens
aactgttgcaatcatgtatccttcattccactcattcatcctgattatgggaagtaggaagctaaaacagacctttctttcagttttgtggcagatgacaygctga

SEQ ID NO: 967 - DNA, 201 bp, Homo sapiens
aagatccacataaaagctctgcaaactgtgacctccttcctcatattacttgccatttactttctgtgtctaatcatatcgttttggaattttaagatgckaccaaaagaaattgtcttaatgctttgccaagcttttggaatcatatatccatcattccactcattcattctgatttgggggaacaagacgctaaagcag

SEQ ID NO: 968 - DNA, 201 bp, Homo sapiens
cccagcaccaagatccacataaaagctctgcaaactgtgacctccttcctcatattacttgccatttactttctgtgtctaatcatatcgttttggaattytaagatgctaccaaaagaaattgtcttaatgctttgccaagcttttggaatcatatatccatcattccactcattcattctgatttgggggaacaagacg

SEQ ID NO: 969 - DNA, 201 bp, Homo sapiens
tcaaattattgctgctctggcagtctccagagttggtttgctctgggtaatattattacattggtattcaactgtgttgaatccaacttcatctaatttaraagtaataatttttatttctaatgcctgggcagtaaccaatcatttcagcatctggcttgctactagcctcagcatattttatttgctcaagatcgtcaa

SEQ ID NO: 970 - DNA, 201 bp, Homo sapiens
ttggaaattttgccaatggctttatagcactgataaatttcattgcctgggtcaagagacaaaagatctcctcagctgatcaaattattgctgctctggcrgtctccagagttggtttgctctgggtaatattattacattggtattcaactgtgttgaatccaacttcatctaatttaaaagtaataatttttatttcta

SEQ ID NO: 971 - DNA, 201 bp, Homo sapiens
cagacttatttttcatcacttaaaaaggaaggctaagagtgtagttctggtgatagtgttggggtctttgttctttttggtttgtcaccttgtgatgaaamacacgtatataaatgtgtggacagaagaatgtgaaggaaacgtaacttggaagatcaaactgaggaatgcaatgcacctttccaacttgactgtagccat

SEQ ID NO: 972 - DNA, 201 bp, Homo sapiens
gtgtaaacatctgaagaagatgcagctccatggcaaaggatctcaagatcccagcaccaagatccacataaaagctctgcaaactgtgacctccttcctcrtattacttgccatttactttctgtgtctaatcatatcgttttggaattttaagatgctaccaaaagaaattgtcttaatgctttgccaagcttttggaat

SEQ ID NO: 973 - DNA, 201 bp, Homo sapiens
ggggaacaagacgctaaagcagacctttctttcagttttgtggcaggtgacttgctgggcaaaaggacagaaccagtcaactccatagattcacaagaggygcattgtgtgttttctagcagaaaacaaattgatggtgtctggaacattttatatttcccacaagtttttccgtagtctatgtatttgagtaatttccaa

SEQ ID NO: 974 - DNA, 201 bp, Homo sapiens
tcgtcaatttctccagacttatttttcatcacttaaaaaggaaggctaagagtgtagttctggtgatagtgttggggtctttgttctttttggtttgtcamcttgtgatgaaacacacgtatataaatgtgtggacagaagaatgtgaaggaaacgtaacttggaagatcaaactgaggaatgcaatgcacctttccaact

SEQ ID NO: 975 - DNA, 201 bp, Homo sapiens
ccagagttggtttgctctgggtaatattattacattggtattcaactgtgttgaatccaacttcatctaatttaaaagtaataatttttatttctaatgcytgggcagtaaccaatcatttcagcatctggcttgctactagcctcagcatattttatttgctcaagatcgtcaatttctccagacttatttttcatcact

SEQ ID NO: 976 - DNA, 201 bp, Homo sapiens
cctttactctgtccctgttatcttttctgctcttaatctgttctttgtgtaaacatctcaagaagatgcagttccatggcaaaggatctccagattccaayaccaaggtccacataaaagctttgcaaacggtgacctccttcctcttgttatttgctgtttactttctgtccctaatcacatcgatttggaattttagga

SEQ ID NO: 977 - DNA, 201 bp, Homo sapiens
gttcatatagtttaggagtaagaattactactattaatgcctgggctgtaaccaaccatttcagcatctgggttgctactagcctcagcatattttatttsctcaagattgccaatttctccaactttatttttcttcacttaaaaaggagaattaagagtgtcattccagtgatactattggggtctttgttatttttgg

SEQ ID NO: 978 - DNA, 201 bp, Homo sapiens
ttgggaattttgctaatggcttcatagtgttggtaaattccattgagtgggtcaagagacaaaagatctcctttgctgaccaaattctcactgctctggcrgtctccagagttggtttgctctgggtaatattattacattggtatgcaactgttttgaatccaggttcatatagtttaggagtaagaattactactatta

SEQ ID NO: 979 - DNA, 195 bp, Homo sapiens
atgataacttttctacccatcattttttccattctagtagtggttacatttgttcttgggaattttgctaatggcttcatagtgttggtaaattscattgagtgggtcaagagacaaaagatctcctttgctgaccaaattctcactgctctggcagtctccagagttggtttgctctgggtaatattattacat

SEQ ID NO: 980 - DNA, 201 bp, Homo sapiens
gactgtaaccacgcttgcaaacttaataccctttactctgtccctgttatcttttctgctcttaatctgttctttgtgtaaacatctcaagaagatgcagytccatggcaaaggatctccagattccaacaccaaggtccacataaaagctttgcaaacggtgacctccttcctcttgttatttgctgtttactttctgtc

SEQ ID NO: 981 - DNA, 201 bp, Homo sapiens
gacctccttcctcttgttatttgctgtttactttctgtccctaatcacatcgatttggaattttaggaggaggctgtagaacgaacctgtcctcatgctcrgccaaactactgcaattatatacccttcatttcattcattcatcctaatttggggaagcaagaagctgaaacagacctttcttttgattttgtgtcagat

SEQ ID NO: 982 - DNA, 201 bp, Homo sapiens
gcaaaggatctccagattccaacaccaaggtccacataaaagctttgcaaacggtgacctccttcctcttgttatttgctgtttactttctgtccctaatsacatcgatttggaattttaggaggaggctgtagaacgaacctgtcctcatgctcagccaaactactgcaattatatacccttcatttcattcattcatcc

SEQ ID NO: 983 - DNA, 190 bp, Homo sapiens
ggcctgtcctcttctagacttcgttgcggcaaggacttttagtagtgtgctggtatttttccatccatctggccattcatttcttctaattttacgggacwgcaaactgaagcaagcttctctctgtgtcctgaagaagatgaagtatgccaaaaaggacataatctctcatttttataaacatgcctga

SEQ ID NO: 984 - DNA, 201 bp, Homo sapiens
gtgatactgttggggtccttggtatttttgatttgtaatcttgctgtggtaaccatggatgacagtgtgtggacaaaagaatttgaaggaaatgtgacttkgaagatcgaattgaggaatgcaatacacctttcaaacatgactataaccaaccatgctagcaaacttcacactgttcattctgactctaatatcttttct

SEQ ID NO: 985 - DNA, 201 bp, Homo sapiens
ccgtgtaaacatctcaagatgatgcagctccatggcaaaggatctcaagatctcagcaccaaggtccatataaaacctttgcaaactgttatctccttccktatgttatttgccatttactttctgtgtataatcacatcaacttggaatcctaggacacagcagagcaatcttgtattcctgctttaccaaactcttgca

SEQ ID NO: 986 - DNA, 201 bp, Homo sapiens
aatacagtacatctttcatatttgactgtaactaccctatggagcttcataccctttactctgtccctgatatcttttctgatgctaatctgttctctgtrtaaacatctcaagaagatgcagctccatggagaaggatcgcaagatctcagcaccaaggtccacataaaagctttgcaaactctgatctccttcctcttg

SEQ ID NO: 987 - DNA, 201 bp, Homo sapiens
ttcagcatgtggcttgctgctaacctcagcatattttatttgctcaagattgccaatttctccaaccttctttttcttcatttaaagaggagagttaggartgtcattctggtgatactgttggggactttgatatttttggtttgtcatcttcttgtggcaaacatggatgagagtatgtgggcagaagaatatgaagga

SEQ ID NO: 988 - DNA, 201 bp, Homo sapiens
aagctttgcaaactctgatctccttcctcttgttatgtgccattttctttctattcctaatcgtttcggtttggagtcctaggaggctgcggaatgacccrgttgtcatggttagcaaggctgttggaaacatatatcttgcattcgactcattcatcctaatttggagaaccaagaagctaaaacacacctttcttttga

SEQ ID NO: 989 - DNA, 106 bp, Homo sapiens
cccattcatcctgatttggggaaacaagaagctaaagcagacttttctttcagttttgtggcatgtgaggtactgggtgaaaggagagaagccttcatctycatag

SEQ ID NO: 990 - DNA, 201 bp, Homo sapiens
ttttctgctgttaatctgttctctgtgtaaacatctcaaaaagatgcagctccatggcaaaggatctcaagatcccagcatgaaggtccacataaaagctwtgcaaactgtgacctccttcctcttgttatgtgccatttactttctgtccataatcatgtcagtttggagttttgagagtctggaaaacaaacctgtctt

SEQ ID NO: 991 - DNA, 201 bp, Homo sapiens
aacttttctgcccatcattttttccattctaatagtggttacatttgtgattggaaattttgctaatggcttcatagcattggtaaattccattgagtggktcaagagacaaaagatctcttttgctgaccaaattctcactgctctggcagtctccagagttggtttactctgggtattagtattaaattggtatgcaac

SEQ ID NO: 992 - DNA, 201 bp, Homo sapiens
ttgtgataaacatgaatcagattatatggacaaaagaatatgaaggaaacatgacttggaagatcaaactgaggagtgcaatgtacctttcaaatacaacrgtaaccatcctagcaaacttagttcccttcactctgaccctgatatcttttctgctgttaatctgttctctgtgtaaacatctcaaaaagatgcagctcc

SEQ ID NO: 993 - DNA, 171 bp, Homo sapiens
gccatttactttctgtgtctaatcacatcaacttggaatcctaggactcagcagagcaaacttgtattcctgctttaccaaactcttggattcatgtatcytttgttccactcattcatcctgactatgggaagtaggaagccaaaacagacctttctttcagctttgtga

SEQ ID NO: 994 - DNA, 201 bp, Homo sapiens
tattacattggtatgcaactgtgtttaatttggcttcatatagattagaagtaagaatttttggttctaatgtctcagcaataaccaagcatttcagcatstgggtgttactagcctcagcatatttcatttgctcaagactgccaatttctccaaccttatttttctccacctaaagaagaggattaagaatgttggttt

SEQ ID NO: 995 - DNA, 201 bp, Homo sapiens
tcagctgaccaaatttctcactgctctggtggtgtccagaattggtttactctgggtcatattattacattggtatgcaactgtgtttaatttggcttcayatagattagaagtaagaatttttggttctaatgtctcagcaataaccaagcatttcagcatctgggtgttactagcctcagcatatttcatttgctcaag

SEQ ID NO: 996 - DNA, 201 bp, Homo sapiens
gccaatggcttcatagctctagtaggtgtccttgagtgggttaagacacaaaagatctcatcagctgaccaaatttctcactgctctggtggtgtccagarttggtttactctgggtcatattattacattggtatgcaactgtgtttaatttggcttcatatagattagaagtaagaatttttggttctaatgtctcagc

SEQ ID NO: 997 - DNA, 201 bp, Homo sapiens
aattctggtagtgtttgcatttgttcttggaaatgttgccaatggcttcatagctctagtaggtgtccttgagtgggttaagacacaaaagatctcatcarctgaccaaatttctcactgctctggtggtgtccagaattggtttactctgggtcatattattacattggtatgcaactgtgtttaatttggcttcatata

SEQ ID NO: 998 - DNA, 201 bp, Homo sapiens
cttatttttctccacctaaagaagaggattaagaatgttggtttggtgatgctgttggggcccttggtatttttcatttgtaatcttgctctgataaccaygggtgagagtgtgtggacaaaagaatatgaaggaaatttgtcttggatgatcaaattgaggaatgcaatacagctttcaaacttgactgtaaccatgcca

SEQ ID NO: 999 - DNA, 201 bp, Homo sapiens
ataaccaagcatttcagcatctgggtgttactagcctcagcatatttcatttgctcaagactgccaatttctccaaccttatttttctccacctaaagaaraggattaagaatgttggtttggtgatgctgttggggcccttggtatttttcatttgtaatcttgctctgataaccacgggtgagagtgtgtggacaaaag

SEQ ID NO: 1000 - DNA, 110 bp, Homo sapiens
tccacccattcatcctgatttggggaaacaagaagctaaagcagacttttctttcagttttgcggcaagtgaggtactgggtgaaaggagagaagccttcrtctccatag

SEQ ID NO: 1001 - DNA, 201 bp, Homo sapiens
tgttttttgctgttaatctgttctctgtgtaaacatctcaagaagatgcagctccatggtaaaggatctcaagatcccagcaccaaggtccacataaaagytttgcaaactgtgatctttttcctcttgttatgtgccgtttactttctgtccataatgatatcagtttggagttttgggagtctggaaaacaaacctgtc

SEQ ID NO: 1002 - DNA, 201 bp, Homo sapiens
caagaagatgcagctccatggtaaaggatctcaagatcccagcaccaaggtccacataaaagctttgcaaactgtgatctttttcctcttgttatgtgccrtttactttctgtccataatgatatcagtttggagttttgggagtctggaaaacaaacctgtcttcatgttctgcaaagctattagattcagctatccttc

SEQ ID NO: 1003 - DNA, 201 bp, Homo sapiens
aaacttagtgcccttcactctgaccctgctatgttttttgctgttaatctgttctctgtgtaaacatctcaagaagatgcagctccatggtaaaggatctsaagatcccagcaccaaggtccacataaaagctttgcaaactgtgatctttttcctcttgttatgtgccgtttactttctgtccataatgatatcagtttg

SEQ ID NO: 1004 - DNA, 201 bp, Homo sapiens
gacaacttttatacccatcattttttccagtgtggtagtggttctatttgttattggaaattttgctaatggcttcatagcattggtaaattccattgagygggtcaagagacaaaagatctcttttgctgaccagattctcactgctctggcggtctccagagttggtttgctctgggtattattattaaattggtattc

SEQ ID NO: 1005 - DNA, 201 bp, Homo sapiens
cattctggtgatgctgttggggcctttactatttttggcttgtcaactttttgtgataaacatgaaagagattgtacggacaaaagaatatgaaggaaacwtgacttggaagatcaaattgaggagtgcagtgtacctttcagatgcgactgtaaccacgctaggaaacttagtgcccttcactctgaccctgctatgttt

SEQ ID NO: 1006 - DNA, 201 bp, Homo sapiens
tcaagattgccaatttctccaaccttatttttcttcacttaaagaggagagttaagagtgtcattctggtgatgctgttggggcctttactatttttggcytgtcaactttttgtgataaacatgaaagagattgtacggacaaaagaatatgaaggaaacatgacttggaagatcaaattgaggagtgcagtgtaccttt

SEQ ID NO: 1007 - DNA, 201 bp, Homo sapiens
ctgtccataatgatatcagtttggagttttgggagtctggaaaacaaacctgtcttcatgttctgcaaagctattagattcagctatccttcaatccaccsattcatcctgatttggggaaacaagaagctaaagcagacttttctttcagttttgcggcaagtgaggtactgggtgaaaggagagaagccttcatctcca

SEQ ID NO: 1008 - DNA, 201 bp, Homo sapiens
ccgcaacaataagaaactcctgggccgcgtgaaggccttcgataggcactgcaacatggtgctggagaacgtgaaggagatgtggactgaggtacccaagrgtggcaagggcaagaagaagtccaagccagtcaacaaagaccgctacatctccaagatgttcctgcgcggggactcagtcatcgtggtcctgcggaaccc

SEQ ID NO: 1009 - DNA, 133 bp, Homo sapiens
taccattcttcaagaaacggtttgaatcagacygcctttccttttgtcttcattgtcataaacatctgcccccgtgtggttctgactggccgcgaacccctacccgaagcttttattccatcattgtgcaccg

SEQ ID NO: 1010 - DNA, 188 bp, Homo sapiens
aagccagtcaacaaagaccgctacatctccaagatgttcctgcgcggggactcagtcatcgtggtcctgcggaacccgctcatcgccggcaagtaggggcmgcctgtctgttgacagaactcactcctctgtcctatgaagaccgctgccattggtgttgagaataataaagctctgtgtttttttct

SEQ ID NO: 1011 - DNA, 201 bp, Homo sapiens
agctgcagaagcgagaggaggaggaatttaacaccggtccactctctgtgctcacacagtcagtcaagaacaatacccaagtgctcatcaactgccgcaayaataagaaactcctgggccgcgtgaaggccttcgataggcactgcaacatggtgctggagaacgtgaaggagatgtggactgaggtacccaagagtggca

SEQ ID NO: 1012 - DNA, 201 bp, Homo sapiens; identical to SEQ ID NO: 1008

SEQ ID NO: 1013 - DNA, 133 bp, Homo sapiens; identical to SEQ ID NO: 1009

SEQ ID NO: 1014 - DNA, 188 bp, Homo sapiens; identical to SEQ ID NO: 1010

SEQ ID NO: 1015 - DNA, 201 bp, Homo sapiens; identical to SEQ ID NO: 1011

SEQ ID NO: 1016 - DNA, 201 bp, Homo sapiens
tgccaactacacgtggctgctggtggagggcgtctacctgcacagtctcctggtgctcgtgggaggctccgaggagggccacttccgctactacctgctcstcggctggggggcccccgcgcttttcgtcattccctgggtgatcgtcaggtacctgtacgagaacacgcagtgctgggagcgcaacgaagtcaaggccat

SEQ ID NO: 1017 - DNA, 201 bp, Homo sapiens
aacacgcagtgctgggagcgcaacgaagtcaaggccatttggtggattatacggacccccatcctcatgaccatcttgattaatttcctcatttttatcckcattcttggcattctcctgtccaagctgaggacacggcaaatgcgctgccgggattaccggctgaggctggctcgctccacgctgacgctggtgcccctg

SEQ ID NO: 1018 - DNA, 201 bp, Homo sapiens
ctctcactgtgcgggctgctgctccagagggcggagacaggctctaaggggcagacggcgggggagctgtaccagcgctgggaacggtaccgcagggagtsccaggagaccttggcagccgcggaaccgccttcaggcctcgcctgtaacgggtccttcgatatgtacgtctgctgggactatgctgcacccaatgccact

SEQ ID NO: 1019 - DNA, 198 bp, Homo sapiens
ggcagcggtggcaggggctgcaggagcaagtgaccaggagcaggactggggacaggcctgatcgcccctgcacgaaccagacccttcgccgccctcasgatgactacctctccgatcctgcagctgctgctgcggctctcactgtgcgggctgctgctccagagggcggagacaggctctaaggggcagacggcgggg

SEQ ID NO: 1020 - DNA, 201 bp, Homo sapiens
ggccctgccctccggctccggcccgggcgaggtccccaccagccgcggcttgtcctcggggaccctcccagggcctgggaatgaggccagccgggagttgsaaagttactgctagggggcgggatccccgtgtctgttcagttagcatggatttattgagtgccaactgcgtgccaggcccagtacggaggacgctgggga

SEQ ID NO: 1021 - DNA, 201 bp, Homo sapiens
tctcctgtccaagctgaggacacggcaaatgcgctgccgggattaccggctgaggctggctcgctccacgctgacgctggtgcccctgctgggtgtccacsaggtggtgtttgctcccgtgacagaggaacaggcccggggcgccctgcgcttcgccaagctcggctttgagatcttcctcagctccttccagggcttcct

SEQ ID NO: 1022 - DNA, 201 bp, Homo sapiens
gtgtggcagtgatggccaatggggactttggagagaccatacacaatgtgagaacccagagaagaatgaggcctttctggaccaaaggctcatcttggagyggttgcaggtcatgtacactgtcggctactccctgtctctcgccacactgctgctagccctgctcatcttgagtttgttcaggcggctacattgcactag

SEQ ID NO: 1023 - DNA, 201 bp, Homo sapiens
atcaacctgttcacgtctttcatgctgcgagctgcggccattctcagccgagaccgtctgctacctcgacctggcccctaccttggggaccaggcccttgygctgtggaaccaggccctcgctgcctgccgcacggcccagatcgtgacccagtactgcgtgggtgccaactacacgtggctgctggtggagggcgtctac

SEQ ID NO: 1024 - DNA, 201 bp, Homo sapiens
aaaacatcaagttccacacacgctatggaatggttatgaagggaagcgagaagggggcctagggtggtctgggaggcgtctccaaggaggtgacacttaarccatccccgaaagaggtgaaagagatcactttggggagagctggagaacaggattctaggcggaagcgatagcataggcaaaggcccttgggcaggaagg

SEQ ID NO: 1025 - DNA, 136 bp, Homo sapiens
ttaagtcagagccaacaggtggggagagacagagaagtgggcaggggcacccaagttgggatttcatttcaggtgcattggagattcttaggagtgtctcytgggggtaatattttattttttaaaaaatgaggat

SEQ ID NO: 1026 - DNA, 201 bp, Homo sapiens
ccagccgcggcttgtcctcggggaccctcccagggcctgggaatgaggccagccgggagttggaaagttactgctagggggcgggatccccgtgtctgttmagttagcatggatttattgagtgccaactgcgtgccaggcccagtacggaggacgctggggaaatggtgaaggaaacagaaaaaaggtccctgcccttct

SEQ ID NO: 1027 - DNA, 201 bp, Homo sapiens
tgcaggtcatgtacactgtcggctactccctgtctctcgccacactgctgctagccctgctcatcttgagtttgttcaggcggctacattgcactagaaaytatatccacatcaacctgttcacgtctttcatgctgcgagctgcggccattctcagccgagaccgtctgctacctcgacctggcccctaccttggggacc

SEQ ID NO: 1028 - DNA, 201 bp, Homo sapiens
gctacattgcactagaaactatatccacatcaacctgttcacgtctttcatgctgcgagctgcggccattctcagccgagaccgtctgctacctcgacctkgcccctaccttggggaccaggcccttgcgctgtggaaccaggccctcgctgcctgccgcacggcccagatcgtgacccagtactgcgtgggtgccaacta

SEQ ID NO: 1029 - DNA, 201 bp, Homo sapiens; identical to SEQ ID NO: 1016

SEQ ID NO: 1030 - DNA, 201 bp, Homo sapiens; identical to SEQ ID NO: 1017

SEQ ID NO: 1031 - DNA, 201 bp, Homo sapiens; identical to SEQ ID NO: 1021

SEQ ID NO: 1032 - DNA, 201 bp, Homo sapiens; identical to SEQ ID NO: 1023

SEQ ID NO: 1033 - DNA, 201 bp, Homo sapiens; identical to SEQ ID NO: 1018

SEQ ID NO: 1034 - DNA, 198 bp, Homo sapiens; identical to SEQ ID NO: 1019

SEQ ID NO: 1035 - DNA, 112 bp, Homo sapiens
ggccctgccctccggctccggcccgggcgaggtccccaccagccgcggcttgtcctcggggaccctcccagggcctgggaatgaggccagccgggagttgsaaagttactgc

SEQ ID NO: 1036 - DNA, 201 bp, Homo sapiens; identical to SEQ ID NO: 1022

SEQ ID NO: 1037 - DNA, 201 bp, Homo sapiens; identical to SEQ ID NO: 1028

SEQ ID NO: 1038 - DNA, 201 bp, Homo sapiens; identical to SEQ ID NO: 1027

SEQ ID NO: 1039 - DNA, 201 bp, Homo sapiens
cggagctggtgtggccattccccaagtgccactggcccatggatgggggtgggtgctggtgccagctgggctgggtgtgggttctgtgtccttccaggatmtgtgtcatttcccatgaggggccggggcaggtggctgggtgggggcacaggctggagtattcttagttctactggttctacactgtgaggtggcaatggg

SEQ ID NO: 1040 - DNA, 201 bp, Homo sapiens
tccgtttccccccgaggatcgaggtggtgcgctctggacggggttgtgcattctcgccgcgcccgggcggacgatccagcgaacagccccgcttctaaccmgagatgctgctgccggcgcccgcgctccgccgcgccctgctgtcccgcccctggaccggggccggcctgcggtggaagcacacctcctccctgaaggtgg

SEQ ID NO: 1041 - DNA, 201 bp, Homo sapiens
gaaagaacttccacttcgtgcaccgctcggccgacgtggagagcgtggtgagcgggaccctccgctcagccttcgagtacggtggccagaagtgttccgcstgctcgcgtctctacgtgccgcactcgctgtggccgcagatcaaagggcggctgctggaggagcacagtcggatcaaagtgggcgaccctgcagaggatt

SEQ ID NO: 1042 - DNA, 201 bp, Homo sapiens
actttgtggagccctgcatcgtggagagcaaggaccctcaggagcccatcatgaaggaggagatcttcgggcctgtactgtctgtgtacgtctacccggaygacaagtacaaggagacgctgcagctggttgacagcaccaccagctatggcctcacgggggcagtgttctcccaggataaggacgtcgtgcaggaggcca

SEQ ID NO: 1043 - DNA, 201 bp, Homo sapiens
tgatccgtttccccccgaggatcgaggtggtgcgctctggacggggttgtgcattctcgccgcgcccgggcggacgatccagcgaacagccccgcttctarcccgagatgctgctgccggcgcccgcgctccgccgcgccctgctgtcccgcccctggaccggggccggcctgcggtggaagcacacctcctccctgaagg

SEQ ID NO: 1044 - DNA, 201 bp, Homo sapiens
gggtcttcctccaggatgcctgcatgggaccccacccggagctggtgtggccattccccaagtgccactggcccatggatgggggtgggtgctggtgccasctgggctgggtgtgggttctgtgtccttccaggatatgtgtcatttcccatgaggggccggggcaggtggctgggtgggggcacaggctggagtattctt

SEQ ID NO: 1045 - DNA, 201 bp, Homo sapiens
tggagagcgtggtgagcgggaccctccgctcagccttcgagtacggtggccagaagtgttccgcctgctcgcgtctctacgtgccgcactcgctgtggccrcagatcaaagggcggctgctggaggagcacagtcggatcaaagtgggcgaccctgcagaggattttgggaccttcttctctgcagtgattgatgccaagt

SEQ ID NO: 1046 - DNA, 201 bp, Homo sapiens
caaggaccctcaggagcccatcatgaaggaggagatcttcgggcctgtactgtctgtgtacgtctacccggatgacaagtacaaggagacgctgcagctgrttgacagcaccaccagctatggcctcacgggggcagtgttctcccaggataaggacgtcgtgcaggaggccacaaaggtgctgaggaatgctgccggcaa

SEQ ID NO: 1047 - DNA, 201 bp, Homo sapiens
atgactttcaaggatggttcttaggggactgtgaaagtgttgggtcttcctccaggatgcctgcatgggaccccacccggagctggtgtggccattccccragtgccactggcccatggatgggggtgggtgctggtgccagctgggctgggtgtgggttctgtgtccttccaggatatgtgtcatttcccatgaggggcc

SEQ ID NO: 1048 - DNA, 201 bp, Homo sapiens
tcgccgcaggtcatcaaggagacacataagcccctgggggactggagctacgcgtacatgcagtgagcccctctcgggctccaccgtccagctgtctgtcygtccagatgcctcctgcttggattctgagtggtcagagatctgtaaagcatgactttcaaggatggttcttaggggactgtgaaagtgttgggtcttcct

SEQ ID NO: 1049 - DNA, 201 bp, Homo sapiens
catgactttcaaggatggttcttaggggactgtgaaagtgttgggtcttcctccaggatgcctgcatgggaccccacccggagctggtgtggccattcccsaagtgccactggcccatggatgggggtgggtgctggtgccagctgggctgggtgtgggttctgtgtccttccaggatatgtgtcatttcccatgaggggc

SEQ ID NO: 1050 - DNA, 201 bp, Homo sapiens
aacttccacttcgtgcaccgctcggccgacgtggagagcgtggtgagcgggaccctccgctcagccttcgagtacggtggccagaagtgttccgcctgctygcgtctctacgtgccgcactcgctgtggccgcagatcaaagggcggctgctggaggagcacagtcggatcaaagtgggcgaccctgcagaggattttggg

SEQ ID NO: 1051 - DNA, 177 bp, Homo sapiens
cagctgggctgggtgtgggttctgtgtccttccaggatatgtgtcatttcccatgaggggccggggcaggtggctgggtgggggcacaggctggagtattyttagttctactggttctacactgtgaggtggcaatgggatttgctcagatgccacccaataaaatgcctgttactt

SEQ ID NO: 1052 - DNA, 201 bp, Homo sapiens
tcggcggcaacctggcgggggcaccggccctgatgggcaacgtggtcctatggaagcccagtgacactgccatgctggccagctatgctgtctaccgcatycttcgggaggctggcctgccccccaacatcatccagtttgtgccagctgatgggcccctatttggggacactgtcaccagctcagagcacctctgtggca

SEQ ID NO: 1053 - DNA, 201 bp, Homo sapiens
ttgggaccttcttctctgcagtgattgatgccaagtcctttgcccgtatcaagaagtggctggagcacgcacgctcctcacccagcctcaccatcctggcygggggcaagtgtgatgactccgtgggctactttgtggagccctgcatcgtggagagcaaggaccctcaggagcccatcatgaaggaggagatcttcgggc

SEQ ID NO: 1054 - DNA, 201 bp, Homo sapiens
tcaggagcccatcatgaaggaggagatcttcgggcctgtactgtctgtgtacgtctacccggatgacaagtacaaggagacgctgcagctggttgacagcrccaccagctatggcctcacgggggcagtgttctcccaggataaggacgtcgtgcaggaggccacaaaggtgctgaggaatgctgccggcaacttctacat

SEQ ID NO: 1055 - DNA, 201 bp, Homo sapiens
tccagctgtctgtccgtccagatgcctcctgcttggattctgagtggtcagagatctgtaaagcatgactttcaaggatggttcttaggggactgtgaaartgttgggtcttcctccaggatgcctgcatgggaccccacccggagctggtgtggccattccccaagtgccactggcccatggatgggggtgggtgctggt

SEQ ID NO: 1056 - DNA, 201 bp, Homo sapiens
tctcccaggataaggacgtcgtgcaggaggccacaaaggtgctgaggaatgctgccggcaacttctacatcaacgacaagtccactggctcgatagtgggycagcagccctttgggggggcccgagcctctggaaccaatgacaagccagggggcccacactacatcctgcgctggacgtcgccgcaggtcatcaaggaga

SEQ ID NO: 1057 - DNA, 201 bp, Homo sapiens
tgggcgaccctgcagaggattttgggaccttcttctctgcagtgattgatgccaagtcctttgcccgtatcaagaagtggctggagcacgcacgctcctcrcccagcctcaccatcctggccgggggcaagtgtgatgactccgtgggctactttgtggagccctgcatcgtggagagcaaggaccctcaggagcccatca

SEQ ID NO: 1058 - DNA, 201 bp, Homo sapiens
ggtgagcgggaccctccgctcagccttcgagtacggtggccagaagtgttccgcctgctcgcgtctctacgtgccgcactcgctgtggccgcagatcaaarggcggctgctggaggagcacagtcggatcaaagtgggcgaccctgcagaggattttgggaccttcttctctgcagtgattgatgccaagtcctttgcccg

SEQ ID NO: 1059 - DNA, 201 bp, Homo sapiens
ggatcaaagtgggcgaccctgcagaggattttgggaccttcttctctgcagtgattgatgccaagtcctttgcccgtatcaagaagtggctggagcacgcrcgctcctcacccagcctcaccatcctggccgggggcaagtgtgatgactccgtgggctactttgtggagccctgcatcgtggagagcaaggaccctcagg

SEQ ID NO: 1060 - DNA, 201 bp, Homo sapiens
tccctgcccctccaggtgtccagggtaaagtgtaactcagactgacctgtggggcacagggggcaccagctggccttgccctctctggtctgggctgtctrccttcctcactgtatctttgcccagacccacctgggccagtaggcccctgtccccagccacacaccttagatgctggcatgccttactccaggtgcctgt

SEQ ID NO: 1061 - DNA, 201 bp, Homo sapiens; identical to SEQ ID NO: 1041

SEQ ID NO: 1062 - DNA, 201 bp, Homo sapiens; identical to SEQ ID NO: 1042

SEQ ID NO: 1063 - DNA, 201 bp, Homo sapiens; identical to SEQ ID NO: 1043

SEQ ID NO: 1064 - DNA, 201 bp, Homo sapiens; identical to SEQ ID NO: 1045

SEQ ID NO: 1065 - DNA, 201 bp, Homo sapiens; identical to SEQ ID NO: 1046

SEQ ID NO: 1066 - DNA, 201 bp, Homo sapiens
tcgccgcaggtcatcaaggagacacataagcccctgggggactggagctacgcgtacatgcagtgagcccctctcgggctccaccgtccagctgtctgtcygtccaggtggccgacctcactgcacagaccccactccagcccctccaccccttcttcatgcacagctgcctttctataatccgggcttgactcccttctt

SEQ ID NO: 1067 - DNA, 201 bp, Homo sapiens
catgactttcaaggatggttcttaggggactgtgaaagtgttgggtcttcctccaggatgcctgcatgggaccccacccggagctggtgtggccattcccsaagtgctggtgccagctgggctgggtgtgggttctgtgtccttccaggatatgtgtcatttcccatgaggggccggggcaggtggctgggtgggggcaca

SEQ ID NO: 1068 - DNA, 201 bp, Homo sapiens; identical to SEQ ID NO: 1050

SEQ ID NO: 1069 - DNA, 201 bp, Homo sapiens; identical to SEQ ID NO: 1052

SEQ ID NO: 1070 - DNA, 201 bp, Homo sapiens
ccagctgtctgtccgtccaggtggccgacctcactgcacagaccccactccagcccctccaccccttcttcatgcacagctgcctttctataatccgggcytgactcccttcttaccactgtattctggcctctcccatgcctcaggctctggtttgagatcgtgctggggaggaacatggccactaccccttatcccatc

SEQ ID NO: 1071 - DNA, 201 bp, Homo sapiens; identical to SEQ ID NO: 1056

SEQ ID NO: 1072 - DNA, 201 bp, Homo sapiens
tgtttggccgaggcctgtgtgattcccggtctgcaccacatggcggggttggggggccgctggaggccacctgccaaggcgtgggatgggatggtcctgcyggtttaggccgtgattctggaaaaccttggatgggccttcgtcctatgtcagccttccctttgatcctcaggccctacctgtagagacctccactcctag

SEQ ID NO: 1073 - DNA, 201 bp, Homo sapiens
tccaggatgcctgcatgggaccccacccggagctggtgtggccattccccaagtgctggtgccagctgggctgggtgtgggttctgtgtccttccaggatmtgtgtcatttcccatgaggggccggggcaggtggctgggtgggggcacaggctggagtattcttagttctactggttctacactgtgaggtggcaatggg

SEQ ID NO: 1074 - DNA, 201 bp, Homo sapiens; identical to SEQ ID NO: 1040

SEQ ID NO: 1075 - DNA, 201 bp, Homo sapiens
tggttcttaggggactgtgaaagtgttgggtcttcctccaggatgcctgcatgggaccccacccggagctggtgtggccattccccaagtgctggtgccasctgggctgggtgtgggttctgtgtccttccaggatatgtgtcatttcccatgaggggccggggcaggtggctgggtgggggcacaggctggagtattctt

SEQ ID NO: 1076 - DNA, 201 bp, Homo sapiens
ggaggccattctgggccccttggcaaacctcaccactcacagaggctcctggccttgatccctgcccctccaggtgtccagggtaaagtgtaactcagacygacctgtggggcacagggggcaccagctggccttgccctctctggtctgggctgtctaccttcctcactgtatctttgcccagacccacctgggccagta

SEQ ID NO: 1077 - DNA, 201 bp, Homo sapiens
ccgtccagctgtctgtccgtccaggtggccgacctcactgcacagaccccactccagcccctccaccccttcttcatgcacagctgcctttctataatccrggcttgactcccttcttaccactgtattctggcctctcccatgcctcaggctctggtttgagatcgtgctggggaggaacatggccactaccccttatcc

SEQ ID NO: 1078 - DNA, 201 bp, Homo sapiens
cttcatgcacagctgcctttctataatccgggcttgactcccttcttaccactgtattctggcctctcccatgcctcaggctctggtttgagatcgtgctrgggaggaacatggccactaccccttatcccatcggccatgtgggaggtatgaccctggtgcctggcaggttctccctctgccctccactgggcccagtgg

SEQ ID NO: 1079 - DNA, 201 bp, Homo sapiens
atgactttcaaggatggttcttaggggactgtgaaagtgttgggtcttcctccaggatgcctgcatgggaccccacccggagctggtgtggccattccccragtgctggtgccagctgggctgggtgtgggttctgtgtccttccaggatatgtgtcatttcccatgaggggccggggcaggtggctgggtgggggcacag

SEQ ID NO: 1080 - DNA, 201 bp, Homo sapiens
ggaggccacctgccaaggcgtgggatgggatggtcctgccggtttaggccgtgattctggaaaaccttggatgggccttcgtcctatgtcagccttccctytgatcctcaggccctacctgtagagacctccactcctagagccagtctcagggtctgggatttccctgcaggagctcagccaccactgtgccatggtgac

SEQ ID NO: 1081 - DNA, 184 bp, Homo sapiens
cagctgggctgggtgtgggttctgtgtccttccaggatatgtgtcatttcccatgaggggccggggcaggtggctgggtgggggcacaggctggagtattyttagttctactggttctacactgtgaggtggcaatgggatttgctcagatgccacccaataaaatgcctgttacttaatcaca

SEQ ID NO: 1082 - DNA, 201 bp, Homo sapiens
aggcctgtgtgattcccggtctgcaccacatggcggggttggggggccgctggaggccacctgccaaggcgtgggatgggatggtcctgccggtttaggcygtgattctggaaaaccttggatgggccttcgtcctatgtcagccttccctttgatcctcaggccctacctgtagagacctccactcctagagccagtctc

SEQ ID NO: 1083 - DNA, 201 bp, Homo sapiens; identical to SEQ ID NO: 1053

SEQ ID NO: 1084 - DNA, 201 bp, Homo sapiens; identical to SEQ ID NO: 1054

SEQ ID NO: 1085 - DNA, 201 bp, Homo sapiens
tgaccacgattcctcccacagatgcctcctgcttggattctgagtggtcagagatctgtaaagcatgactttcaaggatggttcttaggggactgtgaaartgttgggtcttcctccaggatgcctgcatgggaccccacccggagctggtgtggccattccccaagtgctggtgccagctgggctgggtgtgggttctgt

SEQ ID NO: 1086 - DNA, 201 bp, Homo sapiens; identical to SEQ ID NO: 1057

SEQ ID NO: 1087 - DNA, 201 bp, Homo sapiens
ttccctgcaggagctcagccaccactgtgccatggtgacacaggccaaggcagacattggccctcccttctcccagcccccagaggcctggccttgggttygtcagcatgggccgaggacgttgcctgtagaatcctcctctgcctgggagtggctctgtgtggaccagtccctcactggcccattctttttttgacgcag

SEQ ID NO: 1088 - DNA, 201 bp, Homo sapiens; identical to SEQ ID NO: 1059

SEQ ID NO: 1089 - DNA, 201 bp, Homo sapiens; identical to SEQ ID NO: 1058

SEQ ID NO: 1090 - DNA, 201 bp, Homo sapiens
ggatttccctgcaggagctcagccaccactgtgccatggtgacacaggccaaggcagacattggccctcccttctcccagcccccagaggcctggccttgrgttcgtcagcatgggccgaggacgttgcctgtagaatcctcctctgcctgggagtggctctgtgtggaccagtccctcactggcccattctttttttgac

SEQ ID NO: 1091 - DNA, 201 bp, Homo sapiens; identical to SEQ ID NO: 1060

SEQ ID NO: 1092 - DNA, 201 bp, Homo sapiens; identical to SEQ ID NO: 1041

SEQ ID NO: 1093 - DNA, 201 bp, Homo sapiens; identical to SEQ ID NO: 1042

SEQ ID NO: 1094 - DNA, 201 bp, Homo sapiens; identical to SEQ ID NO: 1043

SEQ ID NO: 1095 - DNA, 201 bp, Homo sapiens; identical to SEQ ID NO: 1045

SEQ ID NO: 1096 - DNA, 201 bp, Homo sapiens; identical to SEQ ID NO: 1046

SEQ ID NO: 1097 - DNA, 201 bp, Homo sapiens; identical to SEQ ID NO: 1066

SEQ ID NO: 1098 - DNA, 201 bp, Homo sapiens; identical to SEQ ID NO: 1049

SEQ ID NO: 1099 - DNA, 201 bp, Homo sapiens; identical to SEQ ID NO: 1050

SEQ ID NO: 1100 - DNA, 201 bp, Homo sapiens; identical to SEQ ID NO: 1052

SEQ ID NO: 1101 - DNA, 201 bp, Homo sapiens; identical to SEQ ID NO: 1070

SEQ ID NO: 1102 - DNA, 201 bp, Homo sapiens; identical to SEQ ID NO: 1056

SEQ ID NO: 1103 - DNA, 201 bp, Homo sapiens; identical to SEQ ID NO: 1072

SEQ ID NO: 1104 - DNA, 201 bp, Homo sapiens; identical to SEQ ID NO: 1039

SEQ ID NO: 1105 - DNA, 201 bp, Homo sapiens; identical to SEQ ID NO: 1040

SEQ ID NO: 1106 - DNA, 201 bp, Homo sapiens; identical to SEQ ID NO: 1044

SEQ ID NO: 1107 - DNA, 201 bp, Homo sapiens; identical to SEQ ID NO: 1076

SEQ ID NO: 1108 - DNA, 201 bp, Homo sapiens; identical to SEQ ID NO: 1077

SEQ ID NO: 1109 - DNA, 201 bp, Homo sapiens; identical to SEQ ID NO: 1078

SEQ ID NO: 1110 - DNA, 201 bp, Homo sapiens; identical to SEQ ID NO: 1047

SEQ ID NO: 1111 - DNA, 201 bp, Homo sapiens; identical to SEQ ID NO: 1080

SEQ ID NO: 1112 - DNA, 179 bp, Homo sapiens
cagctgggctgggtgtgggttctgtgtccttccaggatatgtgtcatttcccatgaggggccggggcaggtggctgggtgggggcacaggctggagtattyttagttctactggttctacactgtgaggtggcaatgggatttgctcagatgccacccaataaaatgcctgttacttaa

SEQ ID NO: 1113 - DNA, 201 bp, Homo sapiens; identical to SEQ ID NO: 1082

SEQ ID NO: 1114 - DNA, 201 bp, Homo sapiens; identical to SEQ ID NO: 1053

SEQ ID NO: 1115 - DNA, 201 bp, Homo sapiens; identical to SEQ ID NO: 1054

SEQ ID NO: 1116 - DNA, 201 bp, Homo sapiens
tgaccacgattcctcccacagatgcctcctgcttggattctgagtggtcagagatctgtaaagcatgactttcaaggatggttcttaggggactgtgaaartgttgggtcttcctccaggatgcctgcatgggaccccacccggagctggtgtggccattccccaagtgccactggcccatggatgggggtgggtgctggt

SEQ ID NO: 1117 - DNA, 201 bp, Homo sapiens; identical to SEQ ID NO: 1057

SEQ ID NO: 1118 - DNA, 201 bp, Homo sapiens; identical to SEQ ID NO: 1087

SEQ ID NO: 1119 - DNA, 201 bp, Homo sapiens; identical to SEQ ID NO: 1059

SEQ ID NO: 1120 - DNA, 201 bp, Homo sapiens; identical to SEQ ID NO: 1058

SEQ ID NO: 1121 - DNA, 201 bp, Homo sapiens; identical to SEQ ID NO: 1090

SEQ ID NO: 1122 - DNA, 201 bp, Homo sapiens
aggagcggccgagtgccctctctcgcctcggcgcccgcatccggggccatccgtcctgccgtctctgcggaggccgcatctggcgcgcatctggaaccgcycggccggccgcgctggagcccgcgcccaccctggcccggccgcgccgggagccctgcccggagctggagccgcacctggagccgcgggcccggggccctg

SEQ ID NO: 1123 - DNA, 144 bp, Homo sapiens
agagaaaggtggaaggaagggaaggaggacacattttaattttttggggggatcgagtggcaaagttgaagggacaaggcactgtgaggggaaggcagagsctcactgtgtttaaactactatgcaaaaaacaaaacaaacaac

SEQ ID NO: 1124 - DNA, 201 bp, Homo sapiens
gtgacatgaaccgacacctgcacgagtacatggagatgtgcagcatgaagcgaggcctggacgtgcagatggagacctgccgccggctcatcaaaggctcygcagacaggaattcaccgtcccccagctccgtggccagcagcgactcaggaagtacagatgagatccaggatgagttcgagcgcgaggcggatgtggagc

SEQ ID NO: 1125 - DNA, 201 bp, Homo sapiens
ctgagcaggacggggaggtgaaccggttctcggacgatgaggtcggctccatgaacatcaccgatgagatgaagcgcatgtttaaccagctgcgggagacstttgactttgacgacgactgtgacagcctgacgtgggaagagaatgaagacacgctgctgctctgggaggatttcaccaactgcaatccgaccatcgacc

SEQ ID NO: 1126 - DNA, 201 bp, Homo sapiens
ggccccgcgcagataccgcggcctccaccgcgtcccgaggagcggccgagtgccctctctcgcctcggcgcccgcatccggggccatccgtcctgccgtckctgcggaggccgcatctggcgcgcatctggaaccgcccggccggccgcgctggagcccgcgcccaccctggcccggccgcgccgggagccctgcccggag

SEQ ID NO: 1127 - DNA, 201 bp, Homo sapiens
aggtcggctccatgaacatcaccgatgagatgaagcgcatgtttaaccagctgcgggagacctttgactttgacgacgactgtgacagcctgacgtgggargagaatgaagacacgctgctgctctgggaggatttcaccaactgcaatccgaccatcgacctgcagggcgagcaagaggaaaacttgggcaacttgatcc

SEQ ID NO: 1128 - DNA, 201 bp, Homo sapiens
ggccctgccacctctcctcatggggccaggaaggcccctcggagtggggttcgaagccacaccacacagactttctctgccctcccttctctggaggcccygagggactgctgcttccttccttccttccacaccaccaacgggtgccccgtctccatcccccacccacccaaggaatggtgctgtcaatttctattgttc

SEQ ID NO: 1129 - DNA, 201 bp, Homo sapiens
gatcttccaggtggtccccaaaaagaaagagcgtaaggtggcttccgatgatgacatctctgagcaggacggggaggtgaaccggttctcggacgatgagrtcggctccatgaacatcaccgatgagatgaagcgcatgtttaaccagctgcgggagacctttgactttgacgacgactgtgacagcctgacgtgggaaga

SEQ ID NO: 1130 - DNA, 201 bp, Homo sapiens
ggagatgtgcagcatgaagcgaggcctggacgtgcagatggagacctgccgccggctcatcaaaggctccgcagacaggaattcaccgtcccccagctccrtggccagcagcgactcaggaagtacagatgagatccaggatgagttcgagcgcgaggcggatgtggagcccatggtcagctgatgactgaggccctgcga

SEQ ID NO: 1131 - DNA, 144 bp, Homo sapiens; identical to SEQ ID NO: 1123

SEQ ID NO: 1132 - DNA, 201 bp, Homo sapiens; identical to SEQ ID NO: 1124

SEQ ID NO: 1133 - DNA, 201 bp, Homo sapiens; identical to SEQ ID NO: 1125

SEQ ID NO: 1134 - DNA, 201 bp, Homo sapiens; identical to SEQ ID NO: 1127

SEQ ID NO: 1135 - DNA, 201 bp, Homo sapiens; identical to SEQ ID NO: 1128

SEQ ID NO: 1136 - DNA, 201 bp, Homo sapiens; identical to SEQ ID NO: 1129

SEQ ID NO: 1137 - DNA, 201 bp, Homo sapiens; identical to SEQ ID NO: 1130

SEQ ID NO: 1138 - DNA, 201 bp, Homo sapiens
tttgccgtatcaagtacctacttcagatgaaggaggcgcaagacaaaatccaggacttgcctatggaaacccatattctggtatccaagaaagttcttccsccagcccgctctccatcaagaaatgccctatctgcaaagcagatgatatttgtgatcacaccttggagcaacagcagatgcagcccctttgtttcaattg

SEQ ID NO: 1139 - DNA, 201 bp, Homo sapiens
agctacagagaagcagatctttgaagaccacgtgttctgccactctctctgagtatcccaacctcttggatgtatacagagattttatagaatagaacctrtagcttctaccatgagttatatgagtcaagatcctgcctaacctgaaattattagggatttactcagccctgctgccgctaacagtggagttatgtcact

SEQ ID NO: 1140 - DNA, 201 bp, Homo sapiens
cctgtcttaagattaaataaaaaagagtgtcctggcagttatcttgaggtggggaaggaggtgatgaaacattagtttgtgaaatccaaggccctggcttkctttctttcttttttttttttttttttttgaaacagtctctctctgtcacccaggctggcgtgcaatggcgcagttgactcactacagcctctgcctccc

SEQ ID NO: 1141 - DNA, 201 bp, Homo sapiens
gttcttccgccagcccgctctccatcaagaaatgccctatctgcaaagcagatgatatttgtgatcacaccttggagcaacagcagatgcagcccctttgyttcaattgtccaatttgtgacaagatcttcccagctacagagaagcagatctttgaagaccacgtgttctgccactctctctgagtatcccaacctcttg

SEQ ID NO: 1142 - DNA, 201 bp, Homo sapiens
cgtgcaatggcgcagttgactcactacagcctctgcctcccaggttcaagcgattctcatgccttagcctcccaagtagctgggattacaggtgtgtgccrcaatgcccagctaatttttgtgtttttagtagagacagggtttcactatgttggccaggctggtctcgaactcctggcctcacgtgatctgtccacttca

SEQ ID NO: 1143 - DNA, 201 bp, Homo sapiens
gattaaataaaaaagagtgtcctggcagttatcttgaggtggggaaggaggtgatgaaacattagtttgtgaaatccaaggccctggcttgctttctttcttttttttttttttttttttgaaacagtctctctctgtcacccaggctggcgtgcaatggcgcagttgactcactacagcctctgcctcccaggttcaagc

SEQ ID NO: 1144 - DNA, 201 bp, Homo sapiens
tgcccagctaatttttgtgtttttagtagagacagggtttcactatgttggccaggctggtctcgaactcctggcctcacgtgatctgtccacttcagccstccaaagtgctgggattacaagcgtgagccactgtgctgggcccgaggccctgacttcttgctgtaactttccatgcattttttttaaaaggagcagtgt

SEQ ID NO: 1145 - DNA, 109 bp, Homo sapiens
caggcgggwcgggctctcccttgggtgcttagccccgcccccgtcccactctgccctgttgctgtcgcgccgctgctggttgctgtccctggacccctaccatggagga

SEQ ID NO: 1146 - DNA, 201 bp, Homo sapiens
tgctgggcccgaggccctgacttcttgctgtaactttccatgcattttttttaaaaggagcagtgtggattttcgcaccctttgtgaactaagttcaatgygctctatccaaatttgcctaattgaactataagaaagtaataattccattttctatcccctcagggactgaacaaatggaaataactcccaggcagtatc

SEQ ID NO: 1147 - DNA, 201 bp, Homo sapiens
aatgagacaacttgttaatctctttaatactaaaaataaattactcttctatttcagggacttaggtaatttaaaataaaccttcaatttatggtcttctrttttgaagctcatgggaaaattgtgatcaaaagggctatgggaagggcagaccccgccaatgatttctcttcacctgtcttaagattaaataaaaaagag

SEQ ID NO: 1148 - DNA, 201 bp, Homo sapiens
ttctgctatgtggatgaggatggtgtggtccggggagcaagtattcctttccaattccgtccagaaaatgaggaagacatcctggttgttaccactcaggragaggtggaagagattgagcagcacaacaaggagctttgcaaagaaaaccaggagctgaaggacagctgtatcagcctccagaagcagaactcagacatg

SEQ ID NO: 1149 - DNA, 201 bp, Homo sapiens
caaaaccagaagatgtcctcagaaaatgagaagatgggaatcagagtggatcagcttcaggcccagctgtcaactcaagagaaagaaatggagaagcttgytcagggagatcaagataagacagagcagttagagcagctgaaaaaggaaaatgaccacctctttctcagtttaactgaacagaggaaggaccagaagaag

SEQ ID NO: 1150 - DNA, 201 bp, Homo sapiens
gttggaactgaaagtgaaagaacagaaggactattgggagacagagctgcttcaactgaaagaacaaaaccagaagatgtcctcagaaaatgagaagatgrgaatcagagtggatcagcttcaggcccagctgtcaactcaagagaaagaaatggagaagcttgttcagggagatcaagataagacagagcagttagagca

SEQ ID NO: 1151 - DNA, 201 bp, Homo sapiens
ggacgtcacatgtcattataccttcacccagcatttcatccctcgtcgaaaggattggattggcatctttagagcatttaaatgtttccaagacaaattgraacaagaactactcaaatggaggagccaaggacagaaattgcaggtggggtggaagacaacccgtgagtattacaccttcatgtgggttactttgcccat

SEQ ID NO: 1152 - DNA, 201 bp, Homo sapiens; identical to SEQ ID NO: 1138

SEQ ID NO: 1153 - DNA, 201 bp, Homo sapiens; identical to SEQ ID NO: 1139

SEQ ID NO: 1154 - DNA, 201 bp, Homo sapiens; identical to SEQ ID NO: 1140

SEQ ID NO: 1155 - DNA, 201 bp, Homo sapiens; identical to SEQ ID NO: 1141

SEQ ID NO: 1156 - DNA, 201 bp, Homo sapiens; identical to SEQ ID NO: 1142

SEQ ID NO: 1157 - DNA, 201 bp, Homo sapiens; identical to SEQ ID NO: 1143

SEQ ID NO: 1158 - DNA, 201 bp, Homo sapiens; identical to SEQ ID NO: 1144

SEQ ID NO: 1159 - DNA, 109 bp, Homo sapiens; identical to SEQ ID NO: 1145

SEQ ID NO: 1160 - DNA, 201 bp, Homo sapiens; identical to SEQ ID NO: 1146

SEQ ID NO: 1161 - DNA, 201 bp, Homo sapiens; identical to SEQ ID NO: 1147

SEQ ID NO: 1162 - DNA, 201 bp, Homo sapiens; identical to SEQ ID NO: 1148

SEQ ID NO: 1163 - DNA, 201 bp, Homo sapiens; identical to SEQ ID NO: 1149

SEQ ID NO: 1164 - DNA, 201 bp, Homo sapiens; identical to SEQ ID NO: 1150

SEQ ID NO: 1165 - DNA, 201 bp, Homo sapiens
cccgccgtgcgtccctcttaggagagatgagtcacactctggaactgtccaagaacgaacctgccatcacatctcactgccagatgtataaagcacctgcmtgctcagacttcttgtggcgccacctccacgtctgtcttgtacatgacactcctccacgcggtttccagtgtccacactgctgcccgtgcagtgggacca

SEQ ID NO: 1166 - DNA, 201 bp, Homo sapiens
tatgacggcggcacagcagccagcgggtgggggacgcctgtgttcacccatggtgcccatgtcgttcttctctccctgtgacacagcttgtacagtctgawtctttttatctggggtaggggggcttttatgtttgtccgatggagatttgttttgttttgcttcattttatgcttttttattttagttttgatgttctga

SEQ ID NO: 1167 - DNA, 201 bp, Homo sapiens
caagagggaacccatgggactctctgctacattcagttcttgtgtcgtttgtgaaagttcttaacctgcccaaaaacccccttttccccaagctgcccatsgggcttcggcgccaaaggtgacccgcgccaacctccctcccccccagtgcctatgacggcggcacagcagccagcgggtgggggacgcctgtgttcaccc

SEQ ID NO: 1168 - DNA, 201 bp, Homo sapiens
tgaaaccatcagtcacactgtgaacgtgcccctgcagacgaccctggggaccttggaggagattgcctgctgacacccctcgagtcacccagcactccctscaaacagaccttgaggcccaagacccaggacaaggaacagcaagctcaggtgggatggccccagtgctggaaagaagcaagagccccctatgcacacatt

SEQ ID NO: 1169 - DNA, 201 bp, Homo sapiens
cgtttgtgaaagttcttaacctgcccaaaaacccccttttccccaagctgcccatggggcttcggcgccaaaggtgacccgcgccaacctccctccccccmagtgcctatgacggcggcacagcagccagcgggtgggggacgcctgtgttcacccatggtgcccatgtcgttcttctctccctgtgacacagcttgtaca

SEQ ID NO: 1170 - DNA, 201 bp, Homo sapiens
gctattagacctgcttggcaaagaggaggacgaagggagccacgatgagaatgtgagtacttgtgacacaatgccaaaccactctgaaaccatcagtcacrctgtgaacgtgcccctgcagacgaccctggggaccttggaggagattgcctgctgacacccctcgagtcacccagcactccctccaaacagaccttgagg

SEQ ID NO: 1171 - DNA, 201 bp, Homo sapiens
acagcatcaccgcctgtaggattgactgtgagacccgctacattgtggaaaactgcaactgccgcatggttcacatgccaggggatgcccctttttgtacscctgagcagcacaaggagtgtgcagagcctgccctaggtctgttggcggaaaaggacagcaattactgtctctgcaggacaccctgcaacctaacccgct

SEQ ID NO: 1172 - DNA, 201 bp, Homo sapiens
agctgcctagacctcgctccggccacgtccaacacgacgcatccttgggccccgccgtgcgtccctcttaggagagatgagtcacactctggaactgtccragaacgaacctgccatcacatctcactgccagatgtataaagcacctgcatgctcagacttcttgtggcgccacctccacgtctgtcttgtacatgacac

SEQ ID NO: 1173 - DNA, 201 bp, Homo sapiens
gtccacactgctgcccgtgcagtgggaccagattccaggtccaaagtcaccatgaggccaccctggaatcagaactgcacaatcaagagggaacccatggractctctgctacattcagttcttgtgtcgtttgtgaaagttcttaacctgcccaaaaacccccttttccccaagctgcccatggggcttcggcgccaaag

SEQ ID NO: 1174 - DNA, 201 bp, Homo sapiens
tcttaggagagatgagtcacactctggaactgtccaagaacgaacctgccatcacatctcactgccagatgtataaagcacctgcatgctcagacttcttrtggcgccacctccacgtctgtcttgtacatgacactcctccacgcggtttccagtgtccacactgctgcccgtgcagtgggaccagattccaggtccaaa

SEQ ID NO: 1175 - DNA, 201 bp, Homo sapiens
tcaagagggaacccatgggactctctgctacattcagttcttgtgtcgtttgtgaaagttcttaacctgcccaaaaacccccttttccccaagctgcccayggggcttcggcgccaaaggtgacccgcgccaacctccctcccccccagtgcctatgacggcggcacagcagccagcgggtgggggacgcctgtgttcacc

SEQ ID NO: 1176 - DNA, 201 bp, Homo sapiens
aaagttcttaacctgcccaaaaacccccttttccccaagctgcccatggggcttcggcgccaaaggtgacccgcgccaacctccctcccccccagtgcctrtgacggcggcacagcagccagcgggtgggggacgcctgtgttcacccatggtgcccatgtcgttcttctctccctgtgacacagcttgtacagtctgatt

SEQ ID NO: 1177 - DNA, 201 bp, Homo sapiens; identical to SEQ ID NO: 1165

SEQ ID NO: 1178 - DNA, 201 bp, Homo sapiens; identical to SEQ ID NO: 1166

SEQ ID NO: 1179 - DNA, 201 bp, Homo sapiens; identical to SEQ ID NO: 1167

SEQ ID NO: 1180 - DNA, 201 bp, Homo sapiens; identical to SEQ ID NO: 1168

SEQ ID NO: 1181 - DNA, 201 bp, Homo sapiens; identical to SEQ ID NO: 1169

SEQ ID NO: 1182 - DNA, 201 bp, Homo sapiens; identical to SEQ ID NO: 1170

SEQ ID NO: 1183 - DNA, 201 bp, Homo sapiens; identical to SEQ ID NO: 1171

SEQ ID NO: 1184 - DNA, 201 bp, Homo sapiens; identical to SEQ ID NO: 1172

SEQ ID NO: 1185 - DNA, 201 bp, Homo sapiens; identical to SEQ ID NO: 1173

SEQ ID NO: 1186 - DNA, 201 bp, Homo sapiens; identical to SEQ ID NO: 1174

SEQ ID NO: 1187 - DNA, 201 bp, Homo sapiens; identical to SEQ ID NO: 1175

SEQ ID NO: 1188 - DNA, 201 bp, Homo sapiens; identical to SEQ ID NO: 1176

SEQ ID NO: 1189 - DNA, 201 bp, Homo sapiens
atctcttgcttaccttcaatcagcccccccctgacaacaggtcatctcttggccccgaaaatctgtcacctgcaccctggagcctgggtgactttgaacarctggtgaccagtctgacccttcacgatcctaacatctttggtccccagtaaaggcgctgaagcactgcatgatgttgctgagaacttggggactcggttc

SEQ ID NO: 1190 - DNA, 201 bp, Homo sapiens
tccctcttcagaataaacttgctttataatcaatataatctctgtgcctttgaatctaacaggacacctgggtcccagacgcctgggaattgggtctctcrattccctttggttttggagggaggagtttaaaactgtgcatgggagcaggagggactcaagggtggcagtggtgagtgggaggaaatacactttgggatg

SEQ ID NO: 1191 - DNA, 201 bp, Homo sapiens
cctttggttttggagggaggagtttaaaactgtgcatgggagcaggagggactcaagggtggcagtggtgagtgggaggaaatacactttgggatgactcsttcagccctgagagaggggtgtgagttacccagggaatgggtagggaaggtttaaagcaacacccaaggaaagaagggaaactcatctcttgtagtgatt

SEQ ID NO: 1192 - DNA, 201 bp, Homo sapiens
cataacccagcctcagacccatggagcccacgagagactgcccgctgttcgggggcgccttttccgccatcctccccatgggggccattgacgtaagcgayctccgaccggtcccggacaatcaagaagttttctgccatcccgtgacggaccagagcctgatagtggaacttctcgagctgcaggcccacgtacggggcg

SEQ ID NO: 1193 - DNA, 201 bp, Homo sapiens
ctgtctccatctgttcccccaccccaagccctgacaacaggtcatctcttggccccgaaaatctgtcacctgcaccctggagcctgggtgactttgaacarctggtgaccagtctgacccttcacgatcctaacatctttggtccccagtaaaggcgctgaagcactgcatgatgttgctgagaacttggggactcggttc

SEQ ID NO: 1194 - DNA, 201 bp, Homo sapiens; identical to SEQ ID NO: 1190

SEQ ID NO: 1195 - DNA, 201 bp, Homo sapiens
tagcaaaggacgtgacacttcatcaggccttgctgaggctgccccagtaccagactgatctcttgcttaccttcaatcagcccccgtaaggaggaaggaaygggcgggtatctcatgactgggttcccaggagaatcgggctgggagggacagaacagggagactcactggtgggatcctccaaggaagcaggagtgggcc

SEQ ID NO: 1196 - DNA, 201 bp, Homo sapiens; identical to SEQ ID NO: 1191

SEQ ID NO: 1197 - DNA, 201 bp, Homo sapiens; identical to SEQ ID NO: 1192

SEQ ID NO: 1198 - DNA, 201 bp, Homo sapiens; identical to SEQ ID NO: 1189

SEQ ID NO: 1199 - DNA, 201 bp, Homo sapiens; identical to SEQ ID NO: 1190

SEQ ID NO: 1200 - DNA, 201 bp, Homo sapiens; identical to SEQ ID NO: 1191

SEQ ID NO: 1201 - DNA, 201 bp, Homo sapiens; identical to SEQ ID NO: 1192

SEQ ID NO: 1202 - DNA, 153 bp, Homo sapiens
tgagggcctcggttgtggctcttgaaggctccccattggccccgcgctccagyggcaggagtgtggcggcccggcctccgcaggctacccggggttgaagctactgcgagctccggtggctgcctggggacgctcagggacgctcattcctgg

SEQ ID NO: 1203 - DNA, 193 bp, Homo sapiens
catcccaaagtgtatttcctcccactcaccactgccacccttgagtccctcctgctcccatgcacagttttaaactcctccctccaaaaccaaagggaatygagagacccaattcccaggcgtctgggacccaggtgtcctgttagattcaaaggcacagagattatattgattataaagcaagtttattctg

SEQ ID NO: 1204 - DNA, 183 bp, Homo sapiens
tgagggcctcggttgtggctcttgaaggctccccattggccccgcgctccagtggcaggagtgtggcggcccggcctccgcargctacccggggttgaagctactgcgagctccggtggctgcctggggacgctcagggacgctcattcctggccagagtcctgacttctttctcggatcgag

SEQ ID NO: 1205 - DNA, 201 bp, Homo sapiens
gtggctgcctggggacgctcagggacgctcattcctggccagagtcctgacttctttctcggatcgagatctcgttgctggctcgaggaaatcaccggctsttctcccggatccttttcttctctcacttgctggctttcttcttcctgcctccctggcttccatctcccaaccccgcgattccctcctctactcccgtgc

SEQ ID NO: 1206 - DNA, 201 bp, Homo sapiens
agcatcagggcatgtttcaggcgctaaccgagattggccagaaacatggtctggtggggttatggcgtggggctctgggcggcctgccccgagttatcgtmggttcctccacccagctgtgcaccttctcatccaccaaggacctcctgagccagtgggagatctttcctccccagagctggaagttggcgctggtggctg

SEQ ID NO: 1207 - DNA, 201 bp, Homo sapiens
aatcactacaagagatgagtttcccttctttccttgggtgttgctttaaaccttccctacccattccctgggtaactcacacccctctctcagggctgaasgagtcatcccaaagtgtatttcctcccactcaccactgccacccttgagtccctcctgctcccatgcacagttttaaactcctccctccaaaaccaaagg

SEQ ID NO: 1208 - DNA, 201 bp, Homo sapiens
acttctttctcggatcgagatctcgttgctggctcgaggaaatcaccggctcttctcccggatccttttcttctctcacttgctggctttcttcttcctgmctccctggcttccatctcccaaccccgcgattccctcctctactcccgtgctcccgtcgcccgccatcctgagccatcccacctgcaaccttctgtcttt

SEQ ID NO: 1209 - DNA, 201 bp, Homo sapiens
agatgctcctggtgttgctggtgctctcgtggctgccgcatgggggcgccctgtctctggccgaggcgagccgcgcaagtttcccgggaccctcagagttrcactccgaagactccagattccgagagttgcggaaacgctacgaggacctgctaaccaggctgcgggccaaccagagctgggaagattcgaacaccgacc

SEQ ID NO: 1210 - DNA, 201 bp, Homo sapiens
gttccggctgtccccgacggcgtcaaggtcgtgggacgtgacacgaccgctgcggcgtcagctcagccttgcaagaccccaggcgcccgcgctgcacctgmgactgtcgccgccgccgtcgcagtcggaccaactgctggcagaatcttcgtccgcacggccccagctggagttgcacttgcggccgcaagccgccagggg

SEQ ID NO: 1211 - DNA, 201 bp, Homo sapiens
ggtccgcgcgtcgctggaagacctgggctgggccgattgggtgctgtcgccacgggaggtgcaagtgaccatgtgcatcggcgcgtgcccgagccagttcsgggcggcaaacatgcacgcgcagatcaagacgagcctgcaccgcctgaagcccgacacggtgccagcgccctgctgcgtgcccgccagctacaatcccat

SEQ ID NO: 1212 - DNA, 201 bp, Homo sapiens
gctcctggtgttgctggtgctctcgtggctgccgcatgggggcgccctgtctctggccgaggcgagccgcgcaagtttcccgggaccctcagagttgcacwccgaagactccagattccgagagttgcggaaacgctacgaggacctgctaaccaggctgcgggccaaccagagctgggaagattcgaacaccgacctcgt

SEQ ID NO: 1213 - DNA, 201 bp, Homo sapiens
accgacaccggggtgtcgctccagacctatgatgacttgttagccaaagactgccactgcatatgagcagtcctggtccttccactgtgcacctgcgcggrggacgcgacctcagttgtcctgccctgtggaatgggctcaaggttcctgagacacccgattcctgcccaaacagctgtatttatataagtctgttattta

SEQ ID NO: 1214 - DNA, 201 bp, Homo sapiens
acaccggggtgtcgctccagacctatgatgacttgttagccaaagactgccactgcatatgagcagtcctggtccttccactgtgcacctgcgcgggggasgcgacctcagttgtcctgccctgtggaatgggctcaaggttcctgagacacccgattcctgcccaaacagctgtatttatataagtctgttatttattat

SEQ ID NO: 1215 - DNA, 201 bp, Homo sapiens
cttgttagccaaagactgccactgcatatgagcagtcctggtccttccactgtgcacctgcgcgggggacgcgacctcagttgtcctgccctgtggaatgsgctcaaggttcctgagacacccgattcctgcccaaacagctgtatttatataagtctgttatttattattaatttattggggtgaccttcttggggactc

SEQ ID NO: 1216 - DNA, 201 bp, Homo sapiens
cttccactgtgcacctgcgcgggggacgcgacctcagttgtcctgccctgtggaatgggctcaaggttcctgagacacccgattcctgcccaaacagctgyatttatataagtctgttatttattattaatttattggggtgaccttcttggggactcgggggctggtctgatggaactgtgtatttatttaaaactctgg

SEQ ID NO: 1217 - DNA, 201 bp, Homo sapiens
ccgacctcgtcccggcccctgcagtccggatactcacgccagaagtgcggctgggatccggcggccacctgcacctgcgtatctctcgggccgcccttccygaggggctccccgaggcctcccgccttcaccgggctctgttccggctgtccccgacggcgtcaaggtcgtgggacgtgacacgaccgctgcggcgtcagc

SEQ ID NO: 1218 - DNA, 201 bp, Homo sapiens
gacaaggagagccaggaggagctgggccccaacctcatccaaaagcacagactcccaggctggaatggtgtcctcatatcgaggaagaggatactgaggcycagaaatgtgccctagctttactaggagcgcccccacctaaagatcctccccctaaatacacccccagaccccgcccagctgtggtcattggagtgttta

SEQ ID NO: 1219 - DNA, 201 bp, Homo sapiens
gggccgcccttcccgaggggctccccgaggcctcccgccttcaccgggctctgttccggctgtccccgacggcgtcaaggtcgtgggacgtgacacgacckctgcggcgtcagctcagccttgcaagaccccaggcgcccgcgctgcacctgcgactgtcgccgccgccgtcgcagtcggaccaactgctggcagaatctt

SEQ ID NO: 1220 - DNA, 201 bp, Homo sapiens
actgctggcagaatcttcgtccgcacggccccagctggagttgcacttgcggccgcaagccgccagggggcgccgcagagcgcgtgcgcgcaacggggacsactgtccgctcgggcccgggcgttgctgccgtctgcacacggtccgcgcgtcgctggaagacctgggctgggccgattgggtgctgtcgccacgggaggt

SEQ ID NO: 1221 - DNA, 201 bp, Homo sapiens
acaaagtccggggactataaaggccggtccggcagcatctggtcagtcccagctcagagccgcaacctgcacagccatgcccgggcaagaactcaggacgstgaatggctctcagatgctcctggtgttgctggtgctctcgtggctgccgcatgggggcgccctgtctctggccgaggcgagccgcgcaagtttcccggg

SEQ ID NO: 1222 - DNA, 201 bp, Homo sapiens
tgacagtgactggccccaaggagacagcctccatttttgccacctatcctgccccctatctgtccctgaacaatggcttcctggatcaggttctgggcacygggatgctgattgtggggctcttggccatcctggacagacggaacaagggagtccctgcgggtctggagcctgtggtggtggggatgctgatcctggccc

SEQ ID NO: 1223 - DNA, 201 bp, Homo sapiens
gtgcatcgttggacgcctcccctgggtcaagctccccatttacatcttggtgcagttgctgtctgctttctgtgcttcgggagccacctatgttctctacyatgatgccctacagaactatacaggtgggaacctgacagtgactggccccaaggagacagcctccatttttgccacctatcctgccccctatctgtccct

SEQ ID NO: 1224 - DNA, 201 bp, Homo sapiens
gcatcgttggacgcctcccctgggtcaagctccccatttacatcttggtgcagttgctgtctgctttctgtgcttcgggagccacctatgttctctaccaygatgccctacagaactatacaggtgggaacctgacagtgactggccccaaggagacagcctccatttttgccacctatcctgccccctatctgtccctga

SEQ ID NO: 1225 - DNA, 184 bp, Homo sapiens
agacagagggagcagtgaatagcaatagggtgtttccaccatggtcttcactcaggccccggctgaaatcatgggccacctccrgatacgcagcctcctggcccggcagtgcctggcagagtttctgggtgtgtttgtactcatgctcctcacccaaggagctgtggcccaggctgtcaccagt

SEQ ID NO: 1226 - DNA, 201 bp, Homo sapiens
tgcctcagctcagatgctggagtgtaagctatgattaggacaaccctcacttcactcatggaccctggagccagccactgaccccgcctgggaacaacagwcattcttcctctttgttaatgtgccagaacctgggaggcttctctgtttatctgtttggcatcccttcctcctaaactaagaaggatcctggacagggag

SEQ ID NO: 1227 - DNA, 201 bp, Homo sapiens; identical to SEQ ID NO: 1222

SEQ ID NO: 1228 - DNA, 201 bp, Homo sapiens; identical to SEQ ID NO: 1223

SEQ ID NO: 1229 - DNA, 201 bp, Homo sapiens; identical to SEQ ID NO: 1224

SEQ ID NO: 1230 - DNA, 184 bp, Homo sapiens; identical to SEQ ID NO: 1225

SEQ ID NO: 1231 - DNA, 201 bp, Homo sapiens; identical to SEQ ID NO: 1226

SEQ ID NO: 1232 - DNA, 201 bp, Homo sapiens; identical to SEQ ID NO: 1222

SEQ ID NO: 1233 - DNA, 201 bp, Homo sapiens; identical to SEQ ID NO: 1223

SEQ ID NO: 1234 - DNA, 201 bp, Homo sapiens; identical to SEQ ID NO: 1224

SEQ ID NO: 1235 - DNA, 172 bp, Homo sapiens
cagtgaatagcaatagggtgtttccaccatggtcttcactcaggccccggctgaaatcatgggccacctccrgatacgcagcctcctggcccggcagtgcctggcagagtttctgggtgtgtttgtactcatggggcccacctgaatccagccttctccctggccatgtgca

SEQ ID NO: 1236 - DNA, 201 bp, Homo sapiens; identical to SEQ ID NO: 1226

SEQ ID NO: 1237 - DNA, 201 bp, Homo sapiens
ctgtagactggaccttaagcagtggaattcttgtctcctgttcaggtgaagtgatctgtgaacctcccaacaacaaactggacaaattcagcggaaccctstactggaaggaaaataagttccctctgagcaaccagaacatgctgctgcggggctgtgtgctgcgaaacaccgagtggtgcttcgggctggtcatctttg

SEQ ID NO: 1238 - DNA, 201 bp, Homo sapiens
aagagctgctcaacaccaccatggaccaccttaatgagtacgcaggggaagggctgaggaccctggtgctggcctacaaggatctggatgaagagtactaygaggagtgggctgagcgacgcctccaggccagcctggcccaggacagccgggaggacaggctggctagcatctatgaggaggttgagaacaacatgatgc

SEQ ID NO: 1239 - DNA, 201 bp, Homo sapiens
gagcgctgagggtctcccatgggattgctgggatcttgctgggtgagatggcagtgtgtgcaaaaaagcgccccccagaagaagaaaggagggcgcgggcyaatgaccgagaatacaatgagaaattccagtatgcgagtaactgcatcaagacctccaagtacaatattctcaccttcctgcctgtcaacctctttgagc

SEQ ID NO: 1240 - DNA, 201 bp, Homo sapiens
gtgcctttggttcttgtcctcaccatcacagctgttaaagatgccactgatgactatttccgccacaagagcgataaccaggtgaataaccgccagtctcrggtgctgatcaatggaatcctccagcaggagcagtggatgaatgtctgtgttggtgatattatcaagctagaaaataaccagtttgtggcggctgtagac

SEQ ID NO: 1241 - DNA, 201 bp, Homo sapiens
tgagcgctgagggtctcccatgggattgctgggatcttgctgggtgagatggcagtgtgtgcaaaaaagcgccccccagaagaagaaaggagggcgcgggstaatgaccgagaatacaatgagaaattccagtatgcgagtaactgcatcaagacctccaagtacaatattctcaccttcctgcctgtcaacctctttgag

SEQ ID NO: 1242 - DNA, 201 bp, Homo sapiens
ggcatgggcagtacggggccgccggggcgggcgccgagcgctgagcgctgagggtctcccatgggattgctgggatcttgctgggtgagatggcagtgtgygcaaaaaagcgccccccagaagaagaaaggagggcgcgggctaatgaccgagaatacaatgagaaattccagtatgcgagtaactgcatcaagacctcca

SEQ ID NO: 1243 - DNA, 201 bp, Homo sapiens
cccaaaacaatcaccgtccatgagatgggcacagccatcacctaccagctgctggccatcctggacttcaacaacatccgcaagcggatgtcggtcatagkgcggaatccagaggggaagatccgactctactgcaaaggggctgacactatcctactggacagactgcaccactccactcaagagctgctcaacaccacc

SEQ ID NO: 1244 - DNA, 201 bp, Homo sapiens
atgacatgactgaggttttcatagtcactggccatactgtcctggaggtgcgggaggagctcaggaaagcccgggagaagatgatggactcatcccgctcygtaggcaacggcttcacctatcaggacaagctttcttcttccaagctaacttctgtcctggaggccgttgctggggagtacgccctggtcataaatggtc

SEQ ID NO: 1245 - DNA, 201 bp, Homo sapiens
atgggctcttcgacatgtttcccaaccagttccggtttgtggggaatgcccagaacaccttggcccagcccacggtgtggctgaccattgtgctcaccacrgtcgtctgcatcatgcccgtggttgccttccgattcctcaggctcaacctgaagccggatctctccgacacggtccgctacacacagctcgtgaggaaga

SEQ ID NO: 1246 - DNA, 201 bp, Homo sapiens
aggtcatccgtctgggccacagctacttcatcaactgggataagaagatgttctgcatgaagaagcggacgcctgcagaagcccgcaccaccaccctaaaygaggagctgggccaggtggagtacatcttctccgacaagacgggcaccctcacccagaacatcatggttttcaacaagtgctccatcaatggccacagct

SEQ ID NO: 1247 - DNA, 201 bp, Homo sapiens
gtggcggtgccgacaagcccctcaagggctgaaggccgaggatggatgccctgtgccagtgaccagagcacccagggctggccagtcactgagggaacagygtctcggaactgctggtcctcattccttgcttcccgtccccccggtagactctgtcctgctggtcccaccacacatggctgggacatctgttcccagctg

SEQ ID NO: 1248 - DNA, 201 bp, Homo sapiens
cccccggtagactctgtcctgctggtcccaccacacatggctgggacatctgttcccagctgtaggcccttccaccagctggggagctagagggagcaggyccaagggcagagcagaggctgaggcacggggagccagccccactcggggaccagaagtggaaccaaaaacaagaaaaaactgtgagagattgtgtctgcc

SEQ ID NO: 1249 - DNA, 201 bp, Homo sapiens
ttgtcctcaccatcacagctgttaaagatgccactgatgactatttccgccacaagagcgataaccaggtgaataaccgccagtctcaggtgctgatcaayggaatcctccagcaggagcagtggatgaatgtctgtgttggtgatattatcaagctagaaaataaccagtttgtggcggctgtagactggaccttaagca

SEQ ID NO: 1250 - DNA, 201 bp, Homo sapiens
tcacctcagaattgggagacatcagtaagcttgccaagtttgacggtgaagtgatctgtgaacctcccaacaacaaactggacaaattcagcggaaccctstactggaaggaaaataagttccctctgagcaaccagaacatgctgctgcggggctgtgtgctgcgaaacaccgagtggtgcttcgggctggtcatctttg

SEQ ID NO: 1251 - DNA, 201 bp, Homo sapiens
ccaaggagatgcccgagaagtgggcccgggcccaggcgcctccctcttggagccgaaagaagccctcttgggggacagaagaagaaaggagggcgcgggcyaatgaccgagaatacaatgagaaattccagtatgcgagtaactgcatcaagacctccaagtacaatattctcaccttcctgcctgtcaacctctttgagc

SEQ ID NO: 1252 - DNA, 201 bp, Homo sapiens
gtgcctttggttcttgtcctcaccatcacagctgttaaagatgccactgatgactatttccgccacaagagcgataaccaggtgaataaccgccagtctcrggtgctgatcaatggaatcctccagcaggagcagtggatgaatgtctgtgttggtgatattatcaagctagaaaataaccagtttgtggcggcggatctc

SEQ ID NO: 1253 - DNA, 201 bp, Homo sapiens
cccaaggagatgcccgagaagtgggcccgggcccaggcgcctccctcttggagccgaaagaagccctcttgggggacagaagaagaaaggagggcgcgggstaatgaccgagaatacaatgagaaattccagtatgcgagtaactgcatcaagacctccaagtacaatattctcaccttcctgcctgtcaacctctttgag

SEQ ID NO: 1254 - DNA, 201 bp, Homo sapiens
ttgtcctcaccatcacagctgttaaagatgccactgatgactatttccgccacaagagcgataaccaggtgaataaccgccagtctcaggtgctgatcaayggaatcctccagcaggagcagtggatgaatgtctgtgttggtgatattatcaagctagaaaataaccagtttgtggcggcggatctcctcctcctttcca

SEQ ID NO: 1255 - DNA, 201 bp, Homo sapiens; identical to SEQ ID NO: 1237

SEQ ID NO: 1256 - DNA, 201 bp, Homo sapiens
tgctcaacaccaccatggaccaccttaatgtgggtgagtacgcaggggaagggctgaggaccctggtgctggcctacaaggatctggatgaagagtactaygaggagtgggctgagcgacgcctccaggccagcctggcccaggacagccgggaggacaggctggctagcatctatgaggaggttgagaacaacatgatgg

SEQ ID NO: 1257 - DNA, 201 bp, Homo sapiens; identical to SEQ ID NO: 1239

SEQ ID NO: 1258 - DNA, 201 bp, Homo sapiens; identical to SEQ ID NO: 1240

SEQ ID NO: 1259 - DNA, 201 bp, Homo sapiens; identical to SEQ ID NO: 1241

SEQ ID NO: 1260 - DNA, 201 bp, Homo sapiens; identical to SEQ ID NO: 1242

SEQ ID NO: 1261 - DNA, 201 bp, Homo sapiens; identical to SEQ ID NO: 1243

SEQ ID NO: 1262 - DNA, 201 bp, Homo sapiens; identical to SEQ ID NO: 1244

SEQ ID NO: 1263 - DNA, 201 bp, Homo sapiens; identical to SEQ ID NO: 1245

SEQ ID NO: 1264 - DNA, 201 bp, Homo sapiens; identical to SEQ ID NO: 1246

SEQ ID NO: 1265 - DNA, 201 bp, Homo sapiens; identical to SEQ ID NO: 1247

SEQ ID NO: 1266 - DNA, 201 bp, Homo sapiens; identical to SEQ ID NO: 1248

SEQ ID NO: 1267 - DNA, 201 bp, Homo sapiens; identical to SEQ ID NO: 1249

SEQ ID NO: 1268 - DNA, 201 bp, Homo sapiens
gctactgtggtcagacccagggacagcctccctgcccctgctcatggactctgtcatccaggccctggctgagctggagcagaaagtgccagctgccaagrccagacacacagcttctgcgtggctgatgtcagctccaaactctggcccccacaatcgcctctaccacttcctgctgggggcatggagcctcaatgctac

SEQ ID NO: 1269 - DNA, 201 bp, Homo sapiens
gctggaaacctgggcctgaccttcctccgaggttcccagacccagagccatccagacctgggaactgagggctgctgggaccagctctctgcccctcggamctttacgcttttggaccccaaggcatctctgttaaccatggccttcctcaatggcgccctggatggggtcatccttggagactacctgagccggactcct

SEQ ID NO: 1270 - DNA, 201 bp, Homo sapiens
ctccatgcagcgctaccaccaggacacgcaaggctggggagacatcggctacagtttcgtggtgggctcggacggctacgtgtacgagggacgcggctggyactgggtgggcgcccacacgctcggccacaactcccggggcttcggcgtggccatagtgggcaactacaccgcggcgctgcccaccgaggccgctctgcg

SEQ ID NO: 1271 - DNA, 201 bp, Homo sapiens
ggaaggaatatggggtggtgctggcacctgatggctcgaccgtggctgtggagcctctgctggcggggctggaggcagggctgcaagggcgcagggtcatwaatttgcccttggacagcatggctgccccttgggagactggagatacctttccagatgttgtggccattgctccagatgtaagagccacctcctccccag

SEQ ID NO: 1272 - DNA, 201 bp, Homo sapiens
tgaccaaggaggtggcccgacatgacgtacgagaagggaaggaatatggggtggtgctggcacctgatggctcgaccgtggctgtggagcctctgctggcrgggctggaggcagggctgcaagggcgcagggtcataaatttgcccttggacagcatggctgccccttgggagactggagatacctttccagatgttgtgg

SEQ ID NO: 1273 - DNA, 201 bp, Homo sapiens
gggagacatcggctacagtttcgtggtgggctcggacggctacgtgtacgagggacgcggctggcactgggtgggcgcccacacgctcggccacaactccyggggcttcggcgtggccatagtgggcaactacaccgcggcgctgcccaccgaggccgctctgcgcacggtgcgcgacacgctcccgagttgtgcggtgcg

SEQ ID NO: 1274 - DNA, 201 bp, Homo sapiens
ggcccagcaggtgtggggaacccttgtccttctacagaggctggagccagtacacctccagcttcagtgcatgagccaagaacagctggcccaggtggctrccaatgctaccaaggaattcactgaggccttcctgggatgcccggccatccacccccgctgccgctggggagcggcgccttatcggggccgcccgaagct

SEQ ID NO: 1275 - DNA, 201 bp, Homo sapiens
ctctaccacttcctgctgggggcatggagcctcaatgctacagagttggatccctgcccactaagcccagagctgttaggcctgaccaaggaggtggcccracatgacgtacgagaagggaaggaatatggggtggtgctggcacctgatggctcgaccgtggctgtggagcctctgctggcggggctggaggcagggctg

SEQ ID NO: 1276 - DNA, 201 bp, Homo sapiens
gcccagcctttgcgggtcactctgcgggcaacatccctgatcctgtgacttctgcctatgcagcctcagctcagccccagacccagccagcctgtcctttycccagctcctaatacctctacctttccagccaaggcatggaccctgacacctgccaacagcccctctgccctcacaacctcagcctggccttcatgactt

SEQ ID NO: 1277 - DNA, 201 bp, Homo sapiens
acccagagccatccagacctgggaactgagggctgctgggaccagctctctgcccctcggacctttacgcttttggaccccaaggcatctctgttaaccawggccttcctcaatggcgccctggatggggtcatccttggagactacctgagccggactcctgagccccggccatccctcagccacttgctgagccagtac

SEQ ID NO: 1278 - DNA, 201 bp, Homo sapiens
ctggcccaggtggctgccaatgctaccaaggaattcactgaggccttcctgggatgcccggccatccacccccgctgccgctggggagcggcgccttatcrgggccgcccgaagctgctgcagctgccgctgggattcttgtacgtgcatcacacctacgtgcctgcaccaccctgcacggacttcacgcgctgcgcagcc

SEQ ID NO: 1279 - DNA, 201 bp, Homo sapiens
gggtcatccttggagactacctgagccggactcctgagccccggccatccctcagccacttgctgagccagtactatggggctggggtggccagagacccmgggttccgcagcaacttccgacggcagaacggtgctgctctgacttcagcctccatcctggcccagcaggtgtggggaacccttgtccttctacagaggc

SEQ ID NO: 1280 - DNA, 201 bp, Homo sapiens
acttgctgagccagtactatggggctggggtggccagagacccagggttccgcagcaacttccgacggcagaacggtgctgctctgacttcagcctccatsctggcccagcaggtgtggggaacccttgtccttctacagaggctggagccagtacacctccagcttcagtgcatgagccaagaacagctggcccaggtgg

SEQ ID NO: 1281 - DNA, 201 bp, Homo sapiens
gctccacgaggcccctgccccctgcctgtaacagctgtgcccgcacagcctcagccaggcccccaacttcccggcggcacgtctattcaggaaacctaggyccagcctttgcgggtcactctgcgggcaacatccctgatcctgtgacttctgcctatgcagcctcagctcagccccagacccagccagcctgtcctttcc

SEQ ID NO: 1282 - DNA, 201 bp, Homo sapiens
tcctaatacctctacctttccagccaaggcatggaccctgacacctgccaacagcccctctgccctcacaacctcagcctggccttcatgacttctctacscaagtcacaacctgtcaggctgcaccacctcatcctggcccgccgaaccttgacctcacccctgcccctacccgaaggccctctgtccacacaacatgaa

SEQ ID NO: 1283 - DNA, 201 bp, Homo sapiens; identical to SEQ ID NO: 1268

SEQ ID NO: 1284 - DNA, 201 bp, Homo sapiens; identical to SEQ ID NO: 1269

SEQ ID NO: 1285 - DNA, 201 bp, Homo sapiens; identical to SEQ ID NO: 1270

SEQ ID NO: 1286 - DNA, 201 bp, Homo sapiens; identical to SEQ ID NO: 1271

SEQ ID NO: 1287 - DNA, 201 bp, Homo sapiens; identical to SEQ ID NO: 1272

SEQ ID NO: 1288 - DNA, 201 bp, Homo sapiens; identical to SEQ ID NO: 1273

SEQ ID NO: 1289 - DNA, 201 bp, Homo sapiens; identical to SEQ ID NO: 1274

SEQ ID NO: 1290 - DNA, 201 bp, Homo sapiens; identical to SEQ ID NO: 1275

SEQ ID NO: 1291 - DNA, 201 bp, Homo sapiens; identical to SEQ ID NO: 1277

SEQ ID NO: 1292 - DNA, 201 bp, Homo sapiens; identical to SEQ ID NO: 1278

SEQ ID NO: 1293 - DNA, 201 bp, Homo sapiens; identical to SEQ ID NO: 1279

SEQ ID NO: 1294 - DNA, 201 bp, Homo sapiens; identical to SEQ ID NO: 1280

SEQ ID NO: 1295 - DNA, 201 bp, Homo sapiens
cccaatacataccactttgaataggatgataggaaataaatgatgtactacattaaattaaattattgtattacatttttgtacacatcagtcattcccasgcttggctgaaaatcaggatcatctgagaaacttaaacaatttctgcattcttaatctccactgttattctattatatcagaatcgctaatagaaccaag

SEQ ID NO: 1296 - DNA, 201 bp, Homo sapiens
ggagtagaagccaaaaggatctttaaaaaggattgagcattattcttggcgcacagtccaaaatacaaattggacagaagatctatattgtaccagaactrtttatttcaccccatcaagtataaggttactgattgattggtccttttataaacattggtatatttccattcatgccaaagcaaaagaagtaaaagctaa

SEQ ID NO: 1297 - DNA, 201 bp, Homo sapiens
agggaaataaacttattggaaaattcaaacggacagacaatggaaacgaactgaatactgtccgagaaattataggtgatgaactagtccagacttatgtrtatgaaggagtagaagccaaaaggatctttaaaaaggattgagcattattcttggcgcacagtccaaaatacaaattggacagaagatctatattgtacc

SEQ ID NO: 1298 - DNA, 201 bp, Homo sapiens
ttctaagtggtatatacatatgacatatatattaaaatgtaggaagaaaaatgtttgagtacctgatgaaaatgaatagagagtatgtaatctttgaaagstgaatactgcgtgttctcacttataagtgggagctaaataatgtatacacatggacacaccagagtgtagaataatagacactggagacttggaagagtt

SEQ ID NO: 1299 - DNA, 201 bp, Homo sapiens
ctgtccgagaaattataggtgatgaactagtccagacttatgtgtatgaaggagtagaagccaaaaggatctttaaaaaggattgagcattattcttggcrcacagtccaaaatacaaattggacagaagatctatattgtaccagaactatttatttcaccccatcaagtataaggttactgattgattggtccttttat

SEQ ID NO: 1300 - DNA, 201 bp, Homo sapiens
tttcacataaacacatacattgccaattttccagggctcaaaaagtttccttttattcatattttcacatgacgtaaaattttatgtgcttcacataattktattttagcagggtacatattaggggatggagagggggtacaatttttaagcatttgcagctgcaactctatagacttttgacaaattctttttcacact

SEQ ID NO: 1301 - DNA, 201 bp, Homo sapiens
tatatacatatgacatatatattaaaatgtaggaagaaaaatgtttgagtacctgatgaaaatgaatagagagtatgtaatctttgaaagctgaatactgygtgttctcacttataagtgggagctaaataatgtatacacatggacacaccagagtgtagaataatagacactggagacttggaagagttggagggttgg

SEQ ID NO: 1302 - DNA, 201 bp, Homo sapiens
gtacaatttttaagcatttgcagctgcaactctatagacttttgacaaattctttttcacactgatgtagataacagcttaacatttacatagttcttackacttgccacacactgttctaagtggtatatacatatgacatatatattaaaatgtaggaagaaaaatgtttgagtacctgatgaaaatgaatagagagta

SEQ ID NO: 1303 - DNA, 201 bp, Homo sapiens
ctattatatcagaatcgctaatagaaccaagaattctagaaaatttcctggtgattctgatgcagcctgtccactaacttgtctttgagaacaatggagayatcagttatcaatgttatttttaaccacccccttcttttttgttgttgtgggttttttcacataaacacatacattgccaattttccagggctcaaaaag

SEQ ID NO: 1304 - DNA, 201 bp, Homo sapiens
caaaaagtttccttttattcatattttcacatgacgtaaaattttatgtgcttcacataattgtattttagcagggtacatattaggggatggagaggggktacaatttttaagcatttgcagctgcaactctatagacttttgacaaattctttttcacactgatgtagataacagcttaacatttacatagttcttact

SEQ ID NO: 1305 - DNA, 201 bp, Homo sapiens
gaagtaaaagctaattaggatttaatttgttttatattctctaagatatatatttactaaaagaatttgtgacattttaaaaaacaaaaataaatattgcrtccatgttgctttatatgtagccttgccttttaaaagaaaaagtatgtgaatatgaattgacagactgttttcgtagagagagggtcttactctttcact

SEQ ID NO: 1306 - DNA, 201 bp, Homo sapiens
aaagtttccttttattcatattttcacatgacgtaaaattttatgtgcttcacataattgtattttagcagggtacatattaggggatggagagggggtamaatttttaagcatttgcagctgcaactctatagacttttgacaaattctttttcacactgatgtagataacagcttaacatttacatagttcttactact

SEQ ID NO: 1307 - DNA, 201 bp, Homo sapiens
tatatgtagccttgccttttaaaagaaaaagtatgtgaatatgaattgacagactgttttcgtagagagagggtcttactctttcactcaggctggaatgyagtggagagatcatagctcactgtaacctcaaactcctggactcatgcaatcttcctgcctcaggcttctgagtagctaggactatgggtacattccaca

SEQ ID NO: 1308 - DNA, 201 bp, Homo sapiens
ttgtgacattttaaaaaacaaaaataaatattgcgtccatgttgctttatatgtagccttgccttttaaaagaaaaagtatgtgaatatgaattgacagaytgttttcgtagagagagggtcttactctttcactcaggctggaatgtagtggagagatcatagctcactgtaacctcaaactcctggactcatgcaatct

SEQ ID NO: 1309 - DNA, 201 bp, Homo sapiens
tgacaattacacaagaaggaaataaattcacagtcaaagaatcaagcgcttttcgaaacattgaagttgtttttgaacttggtgtcacctttaattacaayctagcagacggaactgaactcagggggacctggagccttgagggaaataaacttattggaaaattcaaacggacagacaatggaaacgaactgaatactg

SEQ ID NO: 1310 - DNA, 201 bp, Homo sapiens
aatgggtgttaatatagtgaaaaggaagcttgcagctcatgacaatttgaagctgacaattacacaagaaggaaataaattcacagtcaaagaatcaagcrcttttcgaaacattgaagttgtttttgaacttggtgtcacctttaattacaatctagcagacggaactgaactcagggggacctggagccttgagggaaa

SEQ ID NO: 1311 - DNA, 201 bp, Homo sapiens
gcttcctggaacacgccgctggccccacaggtgcgcgctggcgagctggaaccgttgctggtggcggccggaggcggcggtcgggcctacctgaggccgcrggaccgaggccggactcaggcctcccccgagaaactggagaaccgctcggaggcgcccgggagcggcgggagaggcggggcggcagggggcgacgcttca

SEQ ID NO: 1312 - DNA, 201 bp, Homo sapiens
gggcgggagccctctcccagtggcagtgcccctggacagctggagggcgcttcctggaacacgccgctggccccacaggtgcgcgctggcgagctggaacygttgctggtggcggccggaggcggcggtcgggcctacctgaggccgcgggaccgaggccggactcaggcctcccccgagaaactggagaaccgctcggag

SEQ ID NO: 1313 - DNA, 201 bp, Homo sapiens
cctgggctgggctgggggcccctgcccttatccaggccccctgggcgggagccctctcccagtggcagtgcccctggacagctggagggcgcttcctggamcacgccgctggccccacaggtgcgcgctggcgagctggaaccgttgctggtggcggccggaggcggcggtcgggcctacctgaggccgcgggaccgaggc

SEQ ID NO: 1314 - DNA, 201 bp, Homo sapiens
tgtcaccgaggtttccccagccaatgttactctgctcagagccctgggccatggtgcctttggggaggtgtatgagggactggtaattggccttcctgggractccagtcccctgcaggtagctatcaagaccctgccagaactctgctcgcctcaggatgagctggatttcctcatggaggccctcatcatcagcaagtt

SEQ ID NO: 1315 - DNA, 112 bp, Homo sapiens
gtggtggccagrgctgccgtggcaaaatgagctgtcaactttaggttgacaggggtgtggccgcgaccgcaagggcttttgttgccgggtggacccaacagggatgggctgc

SEQ ID NO: 1316 - DNA, 165 bp, Homo sapiens
gggcccagccacttccagcttttgatcttggggccagaggccgccttacacacaccccaggtgtccatggggagcactggattgctctcccattatgagcrtccttcatctgggcagaccccccaccctgcagatgcttctaataaaaagctcttctcatcctcc

SEQ ID NO: 1317 - DNA, 201 bp, Homo sapiens
tgagagactgccaatggcaggcagagctccagctggctgaatgcctgtgcccagaaggcatggagctagctgtggataacgtcacctgcatggacctgcayaagcccccaggccctctggttctgatggtggctgtggtggcaacctcaacactgagcctccttatggtgtgtggggtcctgattctgggtacgaagcgtc

SEQ ID NO: 1318 - DNA, 201 bp, Homo sapiens
gtacgtgctcccttcggcgctcagcgttggggtcccaatcctctccccaggggcgctcacgcaccggctctccgtccgtcccttggggtccccctatcccygcgctgggctgggctggcctgggctgggctgggggcccctgcccttatccaggccccctgggcgggagccctctcccagtggcagtgcccctggacagct

SEQ ID NO: 1319 - DNA, 201 bp, Homo sapiens
gtggcaacctcaacactgagcctccttatggtgtgtggggtcctgattctgggtacgaagcgtctagcaggcacagttgattcaaggctgctcctctccartgagctgggatgggtttctgcggggtcccggggctgacttcaagaccactcaccgcagcagagccgtggtagactcctctgggattctaagataggaagg

SEQ ID NO: 1320 - DNA, 201 bp, Homo sapiens
ggtggcgggggcgccacctacgttttccgggtgcgcgctggcgagctggaaccgttgctggtggcggccggaggcggcggtcgggcctacctgaggccgcrggaccgaggccggactcaggcctcccccgagaaactggagaaccgctcggaggcgcccgggagcggcgggagaggcggggcggcagggggcgacgcttca

SEQ ID NO: 1321 - DNA, 201 bp, Homo sapiens
gggagcgaaggggtcccggggtcgcggcgctgggcgggaggtggcgggggtggcgggggcgccacctacgttttccgggtgcgcgctggcgagctggaacygttgctggtggcggccggaggcggcggtcgggcctacctgaggccgcgggaccgaggccggactcaggcctcccccgagaaactggagaaccgctcggag

SEQ ID NO: 1322 - DNA, 201 bp, Homo sapiens; identical to SEQ ID NO: 1314

SEQ ID NO: 1323 - DNA, 179 bp, Homo sapiens
aggtgggcgtggccagaccagctttaggtccggggagtgtctcgccagcggcagcacacccctgtaagtggtggccagrgctgccgtggcaaaatgagctgtcaactttaggttgacaggggtgtggccgcgaccgcaagggcttttgttgccgggtggacccaacagggatgggctgc

SEQ ID NO: 1324 - DNA, 201 bp, Homo sapiens
gtgtggttcggagccgcgggcgccattctctgctctagcccggggtcccaggagacttttctgcggtcctcgcccctgccgctggcaagtcccagcccccrggacccgaaagtcagcgccccgcctagtatcttggagccagcctccccgctgaattctccgggcaccgaggggtcttggctgttttctacctgcggggcc

SEQ ID NO: 1325 - DNA, 165 bp, Homo sapiens; identical to SEQ ID NO: 1316

SEQ ID NO: 1326 - DNA, 201 bp, Homo sapiens
tgagagactgccaatggcaggcagagctccagctggctgaatgcctgtgcccagaaggcatggagctagctgtggataacgtcacctgcatggacctgcayaagcccccaggccctctggttctgatggtggctgtggtggcaacctcaacactgagcctccttatggtgtgtggggtcctgattctggtgaagcagaaga

SEQ ID NO: 1327 - DNA, 201 bp, Homo sapiens
gcttcctggaacacgccgctggccccacaggtgcgcgctggcgagctggaaccgttgctggtggcggccggaggcggcggtcgggcctacctgaggccgcrggaccgaggccggactcaggcctcccccgagaaactggagaaccgctcggaggcgcccgggagcggcgggagaggcggggcggcaggtggtgggggcggc

SEQ ID NO: 1328 - DNA, 201 bp, Homo sapiens; identical to SEQ ID NO: 1312

SEQ ID NO: 1329 - DNA, 201 bp, Homo sapiens
cacgcggcgatggatgggagcgaaggggtcccggggccccctgggcgggagccctctcccagtggcagtgcccctggacagctggagggcgcttcctggamcacgccgctggccccacaggtgcgcgctggcgagctggaaccgttgctggtggcggccggaggcggcggtcgggcctacctgaggccgcgggaccgaggc

SEQ ID NO: 1330 - DNA, 201 bp, Homo sapiens; identical to SEQ ID NO: 1314

SEQ ID NO: 1331 - DNA, 179 bp, Homo sapiens; identical to SEQ ID NO: 1323

SEQ ID NO: 1332 - DNA, 201 bp, Homo sapiens
gccagttattaccgcaggggggaccgggccttgctcccagtcaagtggatgcccccagaggccttcctggagggcatcttcacatccaagacagattcctrgtcttttggggtgctgctctgggagatcttctcactgggctacatgccctatcctgggcgcaccaaccaggaggtgctggacttcgtcgttggaggaggc

SEQ ID NO: 1333 - DNA, 165 bp, Homo sapiens; identical to SEQ ID NO: 1316

SEQ ID NO: 1334 - DNA, 201 bp, Homo sapiens; identical to SEQ ID NO: 1317

SEQ ID NO: 1335 - DNA, 201 bp, Homo sapiens; identical to SEQ ID NO: 1324

SEQ ID NO: 1336 - DNA, 201 bp, Homo sapiens; identical to SEQ ID NO: 1319

SEQ ID NO: 1337 - DNA, 201 bp, Homo sapiens; identical to SEQ ID NO: 1327

SEQ ID NO: 1338 - DNA, 201 bp, Homo sapiens; identical to SEQ ID NO: 1312

SEQ ID NO: 1339 - DNA, 201 bp, Homo sapiens; identical to SEQ ID NO: 1329

SEQ ID NO: 1340 - DNA, 201 bp, Homo sapiens; identical to SEQ ID NO: 1314

SEQ ID NO: 1341 - DNA, 179 bp, Homo sapiens; identical to SEQ ID NO: 1323

SEQ ID NO: 1342 - DNA, 165 bp, Homo sapiens; identical to SEQ ID NO: 1316

SEQ ID NO: 1343 - DNA, 201 bp, Homo sapiens; identical to SEQ ID NO: 1317

SEQ ID NO: 1344 - DNA, 201 bp, Homo sapiens; identical to SEQ ID NO: 1324

SEQ ID NO: 1345 - DNA, 201 bp, Homo sapiens
ggtggcaacctcaacactgagcctccttatggtgtgtggggtcctgattctgggtacgaagcgtctagcaggcacagttgattcaaggctgctcctctccrtgaagcagaagaagtggcagggcctgcaggagatgaggctgccgagccctgagcttgagctgagcaagcttcgaacctctgccatcaggacagcccccaa

SEQ ID NO: 1346 - DNA, 201 bp, Homo sapiens
agcaatcttctccctcggtctcggggagtcgctgtacatcctggtggggcagcagggagaggacgcctgtcccggagtgagcgcagccagtggggatgggscggcgccggcgccgggggcgagggctgcctgggggccgggggagcgtgctttcctcggtgccgggtcaccagcacagcgaggggaggctcccgggccccg

SEQ ID NO: 1347 - DNA, 179 bp, Homo sapiens; identical to SEQ ID NO: 1323

SEQ ID NO: 1348 - DNA, 201 bp, Homo sapiens; identical to SEQ ID NO: 1324

SEQ ID NO: 1349 - DNA, 201 bp, Homo sapiens; identical to SEQ ID NO: 1311

SEQ ID NO: 1350 - DNA, 201 bp, Homo sapiens; identical to SEQ ID NO: 1312

SEQ ID NO: 1351 - DNA, 201 bp, Homo sapiens; identical to SEQ ID NO: 1313

SEQ ID NO: 1352 - DNA, 201 bp, Homo sapiens; identical to SEQ ID NO: 1314

SEQ ID NO: 1353 - DNA, 112 bp, Homo sapiens; identical to SEQ ID NO: 1315

SEQ ID NO: 1354 - DNA, 165 bp, Homo sapiens; identical to SEQ ID NO: 1316

SEQ ID NO: 1355 - DNA, 201 bp, Homo sapiens; identical to SEQ ID NO: 1317

SEQ ID NO: 1356 - DNA, 201 bp, Homo sapiens; identical to SEQ ID NO: 1318

SEQ ID NO: 1357 - DNA, 201 bp, Homo sapiens; identical to SEQ ID NO: 1345

SEQ ID NO: 1358 - DNA, 201 bp, Homo sapiens
ggtggcgggggcgccacctacgttttccgggtgcgcgctggcgagctggaaccgttgctggtggcggccggaggcggcggtcgggcctacctgaggccgcrggaccgaggccggactcaggcctcccccgagaaactggagaaccgctcggaggcgcccgggagcggcgggagaggcggggcggcaggtggtgggggcggc

SEQ ID NO: 1359 - DNA, 201 bp, Homo sapiens; identical to SEQ ID NO: 1321

SEQ ID NO: 1360 - DNA, 201 bp, Homo sapiens; identical to SEQ ID NO: 1314

SEQ ID NO: 1361 - DNA, 179 bp, Homo sapiens; identical to SEQ ID NO: 1323

SEQ ID NO: 1362 - DNA, 201 bp, Homo sapiens; identical to SEQ ID NO: 1324

SEQ ID NO: 1363 - DNA, 165 bp, Homo sapiens; identical to SEQ ID NO: 1316

SEQ ID NO: 1364 - DNA, 201 bp, Homo sapiens; identical to SEQ ID NO: 1326

SEQ ID NO: 1365 - DNA, 201 bp, Homo sapiens
gtggctcctggggctgccccacacctcacacctttctctgcatgggccctgcgccatgagtaccacctgcagtacctggcactcgctctggcccagaaagyggcagcgctgcagccactgccagccacccatgctgccctctatcatggtatggccttggccctgctgagccggctgctgcccggaagtgagtacctcacc

SEQ ID NO: 1366 - DNA, 201 bp, Homo sapiens
gggcccagtgcccgttgcctgcctgttgttcctgggagcctactaccaggcctggagccagcaaccaagctcatgcccggaggattggctccaggacatgsagcgcctgtcagaggagctgctgctgccactgctgagtcagcccacactgggcagcctgtgggattcccttaggcactgctcccttctctgcaacccgct

SEQ ID NO: 1367 - DNA, 201 bp, Homo sapiens
gagcagaaggcttgccttcctgggagcaggttgtttgagctgttttagagcagtgagccctaccattacatcctgatatctggggcttctgaaggtctgtrctgggagtgaagagtggcttagctatttacccgctctttggggacagggcaaactaaatgcatcccttcttacctaactcccaacccctgccctgggctg

SEQ ID NO: 1368 - DNA, 201 bp, Homo sapiens
tgctgagctgtgtattccggctggagttcctcccggaaagaacatcagggggtccagaggcagccgacttctctgaccagctgtcgttaggaagcagcagrgtccctcggtgtgggcaagggactctgctggctcaggcctgccaggacctccccagcatccgcaactgctacctgactcattgctcgccagcccgagcca

SEQ ID NO: 1369 - DNA, 201 bp, Homo sapiens
cctgcctgcgggcctttggtctgtaagggagcaactgtggcctcctctgtgcatagatctcgggcacggcccttcaacgggcggcgaaagctgcgactcgrtgattcctcattgtagagttgggtgctccagcctcttgttgagccgtgtctaaggcagaccttgaagttgctgtccagacctgagatgtggagagccgtg

SEQ ID NO: 1370 - DNA, 201 bp, Homo sapiens
ggctctgcaccgaggggagctacagcgagtcccaaccctgctactgcccatgcctacggagccgctgctgcccaccgactggcccttcctgccactgattsgcctctaccaccgggcttcagacaccccctcgggactctctcccacagacaccatgggcacagccatgcgggtcctgcagtgggtgctagttttggagag

SEQ ID NO: 1371 - DNA, 201 bp, Homo sapiens
cttaggcactgctcccttctctgcaacccgctgtcctgtgtgccagcccttgaagctccccccagcctcgtgtcactgggctgctcgggaggctgcccccrtctcagtctggctggctcagcctcacccttcccattcctcactgccctcctctctcttcttaataccctggcccagatccacaaggggctgtgtggccag

SEQ ID NO: 1372 - DNA, 201 bp, Homo sapiens
tctttgctggaacctgcctgcgggcctttggtctgtaagggagcaactgtggcctcctctgtgcatagatctcgggcacggcccttcaacgggcggcgaargctgcgactcggtgattcctcattgtagagttgggtgctccagcctcttgttgagccgtgtctaaggcagaccttgaagttgctgtccagacctgagatg

SEQ ID NO: 1373 - DNA, 201 bp, Homo sapiens
ctgccccacacctcacacctttctctgcatgggccctgcgccatgagtaccacctgcagtacctggcactcgctctggcccagaaagcggcagcgctgcarccactgccagccacccatgctgccctctatcatggtatggccttggccctgctgagccggctgctgcccggaagtgagtacctcacccatgagctgctgc

SEQ ID NO: 1374 - DNA, 201 bp, Homo sapiens
agacaggcctggagcacggatgaataagagggaacccccacacggagacactgctggagagagtcgtactggggaggcagctggagcagcaagatgctgtygagaccgaagccaggggagtccgaggtggacctgctgcacttccagagtcagtttctcgcagctggtgcagccccagcagtgcagctggtgaagaaagga

SEQ ID NO: 1375 - DNA, 201 bp, Homo sapiens
gtgttccttcgctcgcgggacacacaggggaaatcagcaacatctggtaagagaagcatctttgcccaggaaattgcggcaaggaggatagctgaagccawgggcccatcagttggggaagttgtgcccaacgtgggcccaccagagggtgccgtgacctgtgagacacccactcctaggaaccagggctgccagcttcct

SEQ ID NO: 1376 - DNA, 201 bp, Homo sapiens; identical to SEQ ID NO: 1367

SEQ ID NO: 1377 - DNA, 201 bp, Homo sapiens; identical to SEQ ID NO: 1368

SEQ ID NO: 1378 - DNA, 201 bp, Homo sapiens; identical to SEQ ID NO: 1371

SEQ ID NO: 1379 - DNA, 201 bp, Homo sapiens; identical to SEQ ID NO: 1365

SEQ ID NO: 1380 - DNA, 201 bp, Homo sapiens; identical to SEQ ID NO: 1366

SEQ ID NO: 1381 - DNA, 201 bp, Homo sapiens
gcgctacgtgctggaggtgacatacccaggacctgcggtggtccttgacatcctggctgtgctcatccgcctggcccggcattccctggaatcagccacargggtcctggagtgccctcggctgatagagactatagttcgagagttcttgcccaccagttggtctcctgtgggggcagggcctacccctagtctatacaa

SEQ ID NO: 1382 - DNA, 201 bp, Homo sapiens; identical to SEQ ID NO: 1370

SEQ ID NO: 1383 - DNA, 201 bp, Homo sapiens
ttccacctgacccgcagccaggtttcccagcagagagcactggcactgcatgtgttagcccaggtcatcagcagggcccaggctggtgagtttggggaccrgctagcaggcagtgtcttaagcctccttttggatgctggtttcctcttcctactgcgcttctccttggatgacagagtggatggggtcattgcaaccgcc

SEQ ID NO: 1384 - DNA, 167 bp, Homo sapiens
ctgcggggcaagatggcggcgcccagacaggcctggagcacggatgaataagagggaacccccacayggagacactgctggagagagtcgtactggggaggcagctggagcagcaagatgctgtcgagaccgaagccaggggagtccgaggtggacctgctgcactt

SEQ ID NO: 1385 - DNA, 201 bp, Homo sapiens
cagcaagatgctgtcgagaccgaagccaggggagtccgaggtggacctgctgcacttccagagtcagtttctcgcagctggtgcagccccagcagtgcagytggtgaagaaaggaaataggggcggtggtgatgccaactcagaccggcctccgctccaggaccatcgggatgtggtgatgttggacaatctcccagattt

SEQ ID NO: 1386 - DNA, 201 bp, Homo sapiens
tgctaatgtcaccaaggaggaacccctcatgtcagcttttgccagtgagcccaggaagagagacaagctggagccagaagccccagctctggcattgcccrtgacccctcagaaagaatggctgcacatggacactgtcgagctggagaagctccactggacccaggacttgccccctgtccggcggcagcagacacagga

SEQ ID NO: 1387 - DNA, 201 bp, Homo sapiens
tcctggagatgaggagctcctcgacagcaccttctcttggtaccatggagctttgacgttccctctgatgcccagccaggaggacaaggaggatgaggacraggatgaagaatgcccagcaggaaaagcaaaaaggaaaagccctgaagaagaaagccggcctccacctgacctggcccgacatgatgtcatcaaggggct

SEQ ID NO: 1388 - DNA, 201 bp, Homo sapiens
aaaaaggaaaagccctgaagaagaaagccggcctccacctgacctggcccgacatgatgtcatcaaggggctcctggctaccagcctgctgcctcggctgygctacgtgctggaggtgacatacccaggacctgcggtggtccttgacatcctggctgtgctcatccgcctggcccggcattccctggaatcagccacaag

SEQ ID NO: 1389 - DNA, 201 bp, Homo sapiens; identical to SEQ ID NO: 1373

SEQ ID NO: 1390 - DNA, 201 bp, Homo sapiens
aatggctgcacatggacactgtcgagctggagaagctccactggacccaggacttgccccctgtccggcggcagcagacacaggagaggatgcaggctcgrttcagtcttcagggagaactactggcccctgacgtggacctgcccacccacctgggtctgcaccaccatggagaggaggcagagagagcggggtattccc

SEQ ID NO: 1391 - DNA, 201 bp, Homo sapiens; identical to SEQ ID NO: 1365

SEQ ID NO: 1392 - DNA, 201 bp, Homo sapiens; identical to SEQ ID NO: 1366

SEQ ID NO: 1393 - DNA, 201 bp, Homo sapiens; identical to SEQ ID NO: 1368

SEQ ID NO: 1394 - DNA, 201 bp, Homo sapiens; identical to SEQ ID NO: 1369

SEQ ID NO: 1395 - DNA, 201 bp, Homo sapiens; identical to SEQ ID NO: 1370

SEQ ID NO: 1396 - DNA, 201 bp, Homo sapiens; identical to SEQ ID NO: 1371

SEQ ID NO: 1397 - DNA, 201 bp, Homo sapiens; identical to SEQ ID NO: 1372

SEQ ID NO: 1398 - DNA, 201 bp, Homo sapiens; identical to SEQ ID NO: 1373

SEQ ID NO: 1399 - DNA, 201 bp, Homo sapiens; identical to SEQ ID NO: 1374

SEQ ID NO: 1400 - DNA, 201 bp, Homo sapiens; identical to SEQ ID NO: 1375

SEQ ID NO: 1401 - DNA, 201 bp, Homo sapiens; identical to SEQ ID NO: 1368

SEQ ID NO: 1402 - DNA, 201 bp, Homo sapiens; identical to SEQ ID NO: 1371

SEQ ID NO: 1403 - DNA, 201 bp, Homo sapiens; identical to SEQ ID NO: 1365

SEQ ID NO: 1404 - DNA, 201 bp, Homo sapiens; identical to SEQ ID NO: 1366

SEQ ID NO: 1405 - DNA, 201 bp, Homo sapiens; identical to SEQ ID NO: 1381

SEQ ID NO: 1406 - DNA, 201 bp, Homo sapiens; identical to SEQ ID NO: 1370

SEQ ID NO: 1407 - DNA, 201 bp, Homo sapiens; identical to SEQ ID NO: 1383

SEQ ID NO: 1408 - DNA, 167 bp, Homo sapiens; identical to SEQ ID NO: 1384

SEQ ID NO: 1409 - DNA, 201 bp, Homo sapiens; identical to SEQ ID NO: 1385

SEQ ID NO: 1410 - DNA, 201 bp, Homo sapiens; identical to SEQ ID NO: 1386

SEQ ID NO: 1411 - DNA, 201 bp, Homo sapiens; identical to SEQ ID NO: 1387

SEQ ID NO: 1412 - DNA, 201 bp, Homo sapiens; identical to SEQ ID NO: 1388

SEQ ID NO: 1413 - DNA, 201 bp, Homo sapiens; identical to SEQ ID NO: 1373

SEQ ID NO: 1414 - DNA, 201 bp, Homo sapiens; identical to SEQ ID NO: 1390

SEQ ID NO: 1415 - DNA, 201 bp, Homo sapiens
attataagacggagaagtatgtgatgaccaggaactggcgggtgggcgccctgcagaggctgctgcagtttgggatcgtggtctatgtggtagggtgggckctcctcgccaaaaaaggctaccaggagcgggacctggaaccccagttttccatcatcaccaaactcaaaggggtttccgtcactcagatcaaggagcttg

SEQ ID NO: 1416 - DNA, 201 bp, Homo sapiens
cccagagcacccgtccgtcccactggctaactgctgggtcgacgaggactgccccgaaggggagggaggcacacacagccacggtgtaaaaacaggccagwgtgtggtgttcaatgggacccacaggacctgtgagatctggagttggtgccccgtggagagtggcgttgtgccctcgaggcccctgctggcccaggccca

SEQ ID NO: 1417 - DNA, 201 bp, Homo sapiens
ctagcaggagctggcagcatgggctccccaggggctacgacaggctgggggcttctggattataagacggagaagtatgtgatgaccaggaactggcgggkgggcgccctgcagaggctgctgcagtttgggatcgtggtctatgtggtagggtgggctctcctcgccaaaaaaggctaccaggagcgggacctggaaccc

SEQ ID NO: 1418 - DNA, 201 bp, Homo sapiens
ccgaaggggagggaggcacacacagccacggtgtaaaaacaggccagtgtgtggtgttcaatgggacccacaggacctgtgagatctggagttggtgcccmgtggagagtggcgttgtgccctcgaggcccctgctggcccaggcccagaacttcacactgttcatcaaaaacacagtcaccttcagcaagttcaacttct

SEQ ID NO: 1419 - DNA, 106 bp, Homo sapiens
ctgccrtgctgactcatgtgcccgcagctagcaggagctggcagcatgggctccccaggggctacgacaggctgggggcttctggattataagacggagaagtatg

SEQ ID NO: 1420 - DNA, 201 bp, Homo sapiens
gcagctagcaggagctggcagcatgggctccccaggggctacgacaggctgggggcttctggattataagacggagaagtatgtgatgaccaggaactggygggtgggcgccctgcagaggctgctgcagtttgggatcgtggtctatgtggtagggtgggctctcctcgccaaaaaaggctaccaggagcgggacctgga

SEQ ID NO: 1421 - DNA, 201 bp, Homo sapiens
ttcaacttctctaagtccaatgccttggagacctgggaccccacctattttaagcactgccgctatgaaccacaattcagcccctactgtcccgtgttccrcattggggacctcgtggccaaggctggagggaccttcgaggacctggcgttgctgggtggctctgtaggcatcagagttcactgggattgtgacctggac

SEQ ID NO: 1422 - DNA, 201 bp, Homo sapiens
cagcccaagttcagggcagatgcccagagcacccgtccgtcccactggctaactgctgggtcgacgaggactgccccgaaggggagggaggcacacacagycacggtgtaaaaacaggccagtgtgtggtgttcaatgggacccacaggacctgtgagatctggagttggtgccccgtggagagtggcgttgtgccctcga

SEQ ID NO: 1423 - DNA, 193 bp, Homo sapiens
ctgccatgctgactcatgtgcccgcagctagcaggagctggcagcatgggctccccaggggctacgacaggctgggggcttctggattataaracggagaagtatgtgatgaccaggaactggcgggtgggcgccctgcagaggctgctgcagtttgggatcgtggtctatgtggtagggtgggctctcctcg

SEQ ID NO: 1424 - DNA, 182 bp, Homo sapiens
aagcaaccgccaactctgtgtggagggagctggcccttgcatcccaagcccgactggccgagtgcctcagacggagctcagcacctgcacccacggccacwgctgctgggagtcagacacagacaccaggatggccctgtccaagttctgacacccacttgccaacccattccgggagcctg

SEQ ID NO: 1425 - DNA, 201 bp, Homo sapiens
gtgacctggacaccggggactctggctgctggcctcactactccttccagctgcaggagaagagctacaacttcaggacagccactcactggtgggagcarccgggtgtggaggcccgcaccctgctcaagctctatggaatccgcttcgacatcctcgtcaccgggcaggtaggcacagggaagttcgggctcatcccca

SEQ ID NO: 1426 - DNA, 201 bp, Homo sapiens
agacggagaagtatgtgatgaccaggaactggcgggtgggcgccctgcagaggctgctgcagtttgggatcgtggtctatgtggtagggtgggctctcctsgccaaaaaaggctaccaggagcgggacctggaaccccagttttccatcatcaccaaactcaaaggggtttccgtcactcagatcaaggagcttggaaacc

SEQ ID NO: 1427 - DNA, 201 bp, Homo sapiens
cctggccctcctcccccatctgcacccccatcataggtagagaccccaccctcccatcggtcctacatggggctgtgcagctggagccaaaaaggcaaggyagaaagaggagtgatgggggagggggattgtttcagcttctctggtgctgtgatgccccaggagagtcctaatctagggaatggggtggagtaggcagat

SEQ ID NO: 1428 - DNA, 201 bp, Homo sapiens
ctcttttcacctcaaagcccttgaagagtgggcaaagacagcaagagagctgcagcctgggcccgagctcagaaacagctgtcgcctcagtctgcgcacargcatgcaccccagggtagtgcctgcagggatgcatgtgtccccgtgggggtgcctgtgccaggcaggcctcaggtgcatgccatgctcagaaccctgctg

SEQ ID NO: 1429 - DNA, 201 bp, Homo sapiens; identical to SEQ ID NO: 1417

SEQ ID NO: 1430 - DNA, 112 bp, Homo sapiens
acgccagcaggccacatggctggccaagcaattattattatggatcccttgggctgtgggccttcccatccaccccaccacaactgcccaggtagctggarctgatcataaa

SEQ ID NO: 1431 - DNA, 201 bp, Homo sapiens; identical to SEQ ID NO: 1420

SEQ ID NO: 1432 - DNA, 201 bp, Homo sapiens; identical to SEQ ID NO: 1421

SEQ ID NO: 1433 - DNA, 201 bp, Homo sapiens; identical to SEQ ID NO: 1422

SEQ ID NO: 1434 - DNA, 201 bp, Homo sapiens
ctagaatcacctgccacctggagcctcagtaaaatgcctggggtccctgctgcctctcaatctccagagccatgtccatggggaggtgggctctgaagggygaaggtgggagagcagggcccctgaggcctgggtatccaaggaggggcacgtgcacctgattctccttggggcccagaggaagctgatgtcatggctgga

SEQ ID NO: 1435 - DNA, 201 bp, Homo sapiens
ctgcttagtttatgaggaccggctgctttccagtggtagcccttttgccatggaggtctgggagagagagcagagggcggcagggctaagttggtgatcaytgggttcttcaggaccttctatatccctcctcggtaaccccccagcccaaccccttggaatctttcctccaggcttcctgagagccctgggggtgggagg

SEQ ID NO: 1436 - DNA, 193 bp, Homo sapiens; identical to SEQ ID NO: 1423

SEQ ID NO: 1437 - DNA, 201 bp, Homo sapiens
tcccatcggtcctacatggggctgtgcagctggagccaaaaaggcaaggtagaaagaggagtgatgggggagggggattgtttcagcttctctggtgctgwgatgccccaggagagtcctaatctagggaatggggtggagtaggcagataatccacctccctatcccccaggcaagggcggagcatgtgtcttgggccca

SEQ ID NO: 1438 - DNA, 201 bp, Homo sapiens
aagcaaccgccaactctgtgtggagggagctggcccttgcatcccaagcccgactggccgagtgcctcagacggagctcagcacctgcacccacggccacwgctgctgggagtcagacacagacaccaggatggccctgtccaagttctgacacccacttgccaacccattccgggagcctgtagccgttccctgctggtt

SEQ ID NO: 1439 - DNA, 201 bp, Homo sapiens; identical to SEQ ID NO: 1415

SEQ ID NO: 1440 - DNA, 201 bp, Homo sapiens
gagttgggggctgggaagggcggggccctgcctggggatctcaaggatgaggccccagcatggaggattgggggtagaattccacccttgaaccccagcaracagtccctcccctgactcccaccttggtagggtgctgcctcagggagccatagaagtcggctgtgttttgagacggcgacagaacctgacccgtggaga

SEQ ID NO: 1441 - DNA, 201 bp, Homo sapiens
ccagcatggaggattgggggtagaattccacccttgaaccccagcagacagtccctcccctgactcccaccttggtagggtgctgcctcagggagccataraagtcggctgtgttttgagacggcgacagaacctgacccgtggagactgggagagcccagcaggcacctgtattgcagggctccgactgcatgtggcagg

SEQ ID NO: 1442 - DNA, 201 bp, Homo sapiens; identical to SEQ ID NO: 1416

SEQ ID NO: 1443 - DNA, 201 bp, Homo sapiens
cctgtcatggaaccctccttgcctggtgtgtgtggctcccctcttcactgggcacctggatccaggcccacctgtgtccctgactcagggtggtcccaggmctggcacctactctttagagagccccagcatctttgatgtggattggagacaattgcctggttccctggggcaggtgaagacttggtgccacaaagaatg

SEQ ID NO: 1444 - DNA, 201 bp, Homo sapiens
cgacagaacctgacccgtggagactgggagagcccagcaggcacctgtattgcagggctccgactgcatgtggcaggggctcctgctgcgtctgggcctgraggtctctctcccagtgctctgtccccagtgttcctagcagaggtatgcttaccagctgtcagcacagaccctcctgctgcctgggtcctggccctcctc

SEQ ID NO: 1445 - DNA, 201 bp, Homo sapiens
gtggggtggtgcagggtggacttggggaccctacccctgaagactgaggccctgcagctaccaggtgggctagaaggtaactggaacaggcctgggcactygtgcacccatgtaggagcatgagggccacactcttttcacctcaaagcccttgaagagtgggcaaagacagcaagagagctgcagcctgggcccgagctc

SEQ ID NO: 1446 - DNA, 201 bp, Homo sapiens
cacctagcagacgtggggagcctgaccccatgcctgtcatggaaccctccttgcctggtgtgtgtggctcccctcttcactgggcacctggatccaggccyacctgtgtccctgactcagggtggtcccaggactggcacctactctttagagagccccagcatctttgatgtggattggagacaattgcctggttccctg

SEQ ID NO: 1447 - DNA, 201 bp, Homo sapiens
tagcccttttgccatggaggtctgggagagagagcagagggcggcagggctaagttggtgatcattgggttcttcaggaccttctatatccctcctcggtraccccccagcccaaccccttggaatctttcctccaggcttcctgagagccctgggggtgggaggctgtgggaggctgtacatctgaaattcacttcagtc

SEQ ID NO: 1448 - DNA, 201 bp, Homo sapiens; identical to SEQ ID NO: 1418

SEQ ID NO: 1449 - DNA, 106 bp, Homo sapiens; identical to SEQ ID NO: 1419

SEQ ID NO: 1450 - DNA, 201 bp, Homo sapiens
aagttctgacacccacttgccaacccattccgggagcctgtagccgttccctgctggttgagagttgggggctgggaagggcggggccctgcctggggatytcaaggatgaggccccagcatggaggattgggggtagaattccacccttgaaccccagcagacagtccctcccctgactcccaccttggtagggtgctgc

SEQ ID NO: 1451 - DNA, 201 bp, Homo sapiens
aagctgatgtcatggctggacaaagtcacggagtaaagccagcaaagccaccctcttcctgtgtagtccttacaggcatgactggaaagttggggggcatytatggtagacatggcacagccatgaagagaccagtggggtggtgcagggtggacttggggaccctacccctgaagactgaggccctgcagctaccaggtg

SEQ ID NO: 1452 - DNA, 201 bp, Homo sapiens
tgtggcaggggctcctgctgcgtctgggcctggaggtctctctcccagtgctctgtccccagtgttcctagcagaggtatgcttaccagctgtcagcacaraccctcctgctgcctgggtcctggccctcctcccccatctgcacccccatcataggtagagaccccaccctcccatcggtcctacatggggctgtgcagc

SEQ ID NO: 1453 - DNA, 201 bp, Homo sapiens
ggtccctgctgcctctcaatctccagagccatgtccatggggaggtgggctctgaagggcgaaggtgggagagcagggcccctgaggcctgggtatccaasgaggggcacgtgcacctgattctccttggggcccagaggaagctgatgtcatggctggacaaagtcacggagtaaagccagcaaagccaccctcttcctg

SEQ ID NO: 1454 - DNA, 201 bp, Homo sapiens
gtgacctggacaccggggactctggctgctggcctcactactccttccagctgcaggagaagagctacaacttcaggacagccactcactggtgggagcarccgggtgtggaggcccgcaccctgctcaagctctatggaatccgcttcgacatcctcgtcaccgggcaggcagggaagttcgggctcatccccacggccg

SEQ ID NO: 1455 - DNA, 201 bp, Homo sapiens; identical to SEQ ID NO: 1426

SEQ ID NO: 1456 - DNA, 201 bp, Homo sapiens
ccctgctgcctctcaatctccagagccatgtccatggggaggtgggctctgaagggcgaaggtgggagagcagggcccctgaggcctgggtatccaaggargggcacgtgcacctgattctccttggggcccagaggaagctgatgtcatggctggacaaagtcacggagtaaagccagcaaagccaccctcttcctgtgt

SEQ ID NO: 1457 - DNA, 201 bp, Homo sapiens
aagcccttgaagagtgggcaaagacagcaagagagctgcagcctgggcccgagctcagaaacagctgtcgcctcagtctgcgcacaggcatgcaccccagsgtagtgcctgcagggatgcatgtgtccccgtgggggtgcctgtgccaggcaggcctcaggtgcatgccatgctcagaaccctgctgccctttctaggcag

SEQ ID NO: 1458 - DNA, 175 bp, Homo sapiens
cgggctcagtgctcagagcggaggcagcggctgcggcagcagcaggttccagtagctggctcggtgctcttctcrgccacctgccatggcccgggggctgcccaccattgctagcctggcacgcttatgccagaagctgaaccgcctgaagccgctggaggactccaccatggag

SEQ ID NO: 1459 - DNA, 201 bp, Homo sapiens
gctcacaggtgccgtggccaaggaggtggctggccctgctgtgctcttgtccttcggtgtggccgctgtggcctccctgctggcagccctatgctatgcaraatttggggcacgtgtgccacgcacgggctctgcctacctgttcacctacgtatccatgggcgagctgtgggccttcctcatcggctggaatgttctcct

SEQ ID NO: 1460 - DNA, 201 bp, Homo sapiens
tggggcacgtgtgccacgcacgggctctgcctacctgttcacctacgtatccatgggcgagctgtgggccttcctcatcggctggaatgttctcctcgaawacatcatcggtggcgccgccgtggcccgtgcctggagtggctacctggactctatgttcagccacagcatccgcaacttcactgagacccacgtgggttc

SEQ ID NO: 1461 - DNA, 201 bp, Homo sapiens
aggaccttcatccaggggctgggcttcgggtcttcaggagtgggccttggctggtgctggtgccatggactctgcccagagccttcttgtttatgatcagytccagctacctgggcagttgtggtggggtggatgggaaggcccacagcccaagggatccataataataattgcttggccagccatgtggcctgctggcgt

SEQ ID NO: 1462 - DNA, 201 bp, Homo sapiens
caatcacaccttctcggccatcagcctgcttgtcattctcttcattgtcatcctgggcttcatcctggcccagcctcacaactggagcgctgacgaaggcrgctttgcacccttcggcttctccggcgtcatggccggcactgcctcctgcttctatgctttcgtgggcttcgacgtcattgccgcctccagtgaggaggc

SEQ ID NO: 1463 - DNA, 201 bp, Homo sapiens
tatgccagaagctgaaccgcctgaagccgctggaggactccaccatggagacgtcactgcggcgctgcctgtccacactggacctgactcttctgggcgtrggtggcatggtgggctcgggtctctacgtgctcacaggtgccgtggccaaggaggtggctggccctgctgtgctcttgtccttcggtgtggccgctgtgg

SEQ ID NO: 1464 - DNA, 201 bp, Homo sapiens
tcttctcggccacctgccatggcccgggggctgcccaccattgctagcctggcacgcttatgccagaagctgaaccgcctgaagccgctggaggactccaycatggagacgtcactgcggcgctgcctgtccacactggacctgactcttctgggcgtgggtggcatggtgggctcgggtctctacgtgctcacaggtgcc

SEQ ID NO: 1465 - DNA, 201 bp, Homo sapiens
ccaccattgctagcctggcacgcttatgccagaagctgaaccgcctgaagccgctggaggactccaccatggagacgtcactgcggcgctgcctgtccacrctggacctgactcttctgggcgtgggtggcatggtgggctcgggtctctacgtgctcacaggtgccgtggccaaggaggtggctggccctgctgtgctct

SEQ ID NO: 1466 - DNA, 201 bp, Homo sapiens
gtgggctggcttcatcgtggcagctggctccatctgcgccatgaacaccgtcctgctcagcctcctcttctccctgccacgcattgtctatgccatggccrccgatgggctcttcttccaggtgtttgcccatgtgcacccccggacacaggtgcctgtggcgggcaccctggcgttcgggctcctcacggccttcctggc

SEQ ID NO: 1467 - DNA, 201 bp, Homo sapiens
accataggctgcgtgcttgtctttgggaactcgaccctgcacctcccacactggggttacatcctgctgctcctgctcaccagtgtcatgtttctgctcascctccttgtcctgggggctcaccagcaacagtatcgggaagacttatttcagatccccatggttcccctgattccagccctgagcatcgtcctcaacatc

SEQ ID NO: 1468 - DNA, 201 bp, Homo sapiens
tgggcgtgggtggcatggtgggctcgggtctctacgtgctcacaggtgccgtggccaaggaggtggctggccctgctgtgctcttgtccttcggtgtggcmgctgtggcctccctgctggcagccctatgctatgcagaatttggggcacgtgtgccacgcacgggctctgcctacctgttcacctacgtatccatgggcg

SEQ ID NO: 1469 - DNA, 201 bp, Homo sapiens
cctggagtggctacctggactctatgttcagccacagcatccgcaacttcactgagacccacgtgggttcttggcaggtgcccctcctgggccactacccrgacttcctggctgctggcatcatcctcctggcctctgcctttgtctcctgtggagcccgcgtgtcctcctggctcaatcacaccttctcggccatcagcc

SEQ ID NO: 1470 - DNA, 201 bp, Homo sapiens
tcctcttctccctgccacgcattgtctatgccatggccgccgatgggctcttcttccaggtgtttgcccatgtgcacccccggacacaggtgcctgtggcrggcaccctggcgttcgggctcctcacggccttcctggcactgctgctggacctggagtcgctggttcagttcctgtcccttggcacactcctggcctaca

SEQ ID NO: 1471 - DNA, 201 bp, Homo sapiens
agccaggcaccagcacaggaccctggccatatggagtagctgatcagcccacacttgccccgccctcccacacctgcttgggaggccagagaggccagacragccgagagccccttctgttgtgggcagcctgggtttgcaggcctgcacaggctggggagtcctcaggaccttaggaccttcatccaggggctgggcttc

SEQ ID NO: 1472 - DNA, 201 bp, Homo sapiens
ggcgtgggtggcatggtgggctcgggtctctacgtgctcacaggtgccgtggccaaggaggtggctggccctgctgtgctcttgtccttcggtgtggccgstgtggcctccctgctggcagccctatgctatgcagaatttggggcacgtgtgccacgcacgggctctgcctacctgttcacctacgtatccatgggcgag

SEQ ID NO: 1473 - DNA, 201 bp, Homo sapiens
gaggagacagtgcaggctatgcagccccccagccaggcaccagcacaggaccctggccatatggagtagctgatcagcccacacttgccccgccctcccayacctgcttgggaggccagagaggccagacaagccgagagccccttctgttgtgggcagcctgggtttgcaggcctgcacaggctggggagtcctcaggac

SEQ ID NO: 1474 - DNA, 201 bp, Homo sapiens
gggtctctacgtgctcacaggtgccgtggccaaggaggtggctggccctgctgtgctcttgtccttcggtgtggccgctgtggcctccctgctggcagccytatgctatgcagaatttggggcacgtgtgccacgcacgggctctgcctacctgttcacctacgtatccatgggcgagctgtgggccttcctcatcggctg

SEQ ID NO: 1475 - DNA, 201 bp, Homo sapiens
ccagaaaactagaccacaaagagcctgactgccgaacagtcaggacacaagagttgggcctctcagaggaccacatcatctgggatggtaccttggggggkccagagcatagtgtcctcgatctctggaggactaaaccacccaaaggccaggcccccactgatagaagctccagagatggaacctccaatgagcctagtc

SEQ ID NO: 1476 - DNA, 201 bp, Homo sapiens
tggctgcaacaggccatcaatagccgtaaggagtacctacttcttaaacaaacactgagatccccagaggcgggcccgatcagagaggaaccccgcgtgtkcctagaacatggggaacaggcctgtgagagggaccagtcacaaccaagcgcaccactggaggaccagtcctacagagacaggaccactggagagctagaa

SEQ ID NO: 1477 - DNA, 201 bp, Homo sapiens
cgtaaggagtacctacttcttaaacaaacactgagatccccagaggcgggcccgatcagagaggaaccccgcgtgttcctagaacatggggaacaggcctrtgagagggaccagtcacaaccaagcgcaccactggaggaccagtcctacagagacaggaccactggagagctagaacaggaggatgactcctgtcacagg

SEQ ID NO: 1478 - DNA, 201 bp, Homo sapiens
taagtgcagagaaccatgctacagcaagtctggaccaccgtcgtctataccatcaaacagccaggccttgggggacaggctcaccaaagggccagacgatrgaagacagacctttggagggacctgcctgctgcagatgaaaatcctggaggaccagacccccagaggtttaaaacctaggaaccattgtcccaggaagtc

SEQ ID NO: 1479 - DNA, 201 bp, Homo sapiens
aaagtcacctgagattctgtcttctacaaaggcaggctgtacaggagaggaacagtggaggggcaggccatggaaaacagaaccacctggctagaccctakgaagccaggagaggatcaggttccaaaggggaatgctatgaaagggcagtgagacaagacctcatcctacctccctgaccagctctggcttctgctcctg

SEQ ID NO: 1480 - DNA, 201 bp, Homo sapiens
gatcagagaggaaccccgcgtgttcctagaacatggggaacaggcctgtgagagggaccagtcacaaccaagcgcaccactggaggaccagtcctacagasacaggaccactggagagctagaacaggaggatgactcctgtcacagggtcaaatcaccccacagatccccaggaagtttggccactacacaaaaaaacat

SEQ ID NO: 1481 - DNA, 201 bp, Homo sapiens
cagaggaccacatcatctgggatggtaccttgggggggccagagcatagtgtcctcgatctctggaggactaaaccacccaaaggccaggcccccactgayagaagctccagagatggaacctccaatgagcctagtcatgaaggacagaaaaagcagaggactataccatggagatcaaagtcacctgagattctgtctt

SEQ ID NO: 1482 - DNA, 201 bp, Homo sapiens
tgctgtcagtacgattattgcaactcctggtcaagcccccaactccagagctctctgccggagccccatgacaggcccctggccctgcctctgtctgactmccagattcagtggttctaccaggccctgaacctctccctgcccctccccaatttccatgctgggacggagcctgatggcctggaccccatggtcacactg

SEQ ID NO: 1483 - DNA, 201 bp, Homo sapiens
taggcctccgtctgttgtaccactagcatctatatgacttttgtgtaattttctctcttgaactctggtgctgtttttttgtttgtttgagacaaagtctygctctgtcacccagggtggagtgcagtggcatgatctctgctcactacaacctccacctcccgggttccagcgattctcctgcctcagcctcccgagtag

SEQ ID NO: 1484 - DNA, 201 bp, Homo sapiens
acggggtttcaccatgttggtcaggctggtctcgaactcctgacctcgtaatctgccctcctcgacctcccaaagtgccgggattacaggtgtgagccacygtgcctgtctgagctctggtgctgttcttccccctagaaaagaatctctagtgtggattctgcccagacaggctgacctgagaaaggcacagtggttcct

SEQ ID NO: 1485 - DNA, 201 bp, Homo sapiens
tcaccatgttggtcaggctggtctcgaactcctgacctcgtaatctgccctcctcgacctcccaaagtgccgggattacaggtgtgagccactgtgcctgkctgagctctggtgctgttcttccccctagaaaagaatctctagtgtggattctgcccagacaggctgacctgagaaaggcacagtggttcctccattcct

SEQ ID NO: 1486 - DNA, 130 bp, Homo sapiens
aatcccagcactttgggaggccgaggtgggcggatcacttgagattgggagtttgagaccagcctggccaacatggtaaaacccgctctctattaaaaatwgaaaaatcagctgggtgtggtggcacacc

SEQ ID NO: 1487 - DNA, 201 bp, Homo sapiens
catcgttcgaggctgtggacagtacatttcctaccgctgccaagaaaaacgcaacacctactttgcagagtactggtatcaggcccagtgctgtcagtacrattattgcaactcctggtcaagcccccaactccagagctctctgccggagccccatgacaggcccctggccctgcctctgtctgactcccagattcagtg

SEQ ID NO: 1488 - DNA, 201 bp, Homo sapiens
tcccctgtcttgtccatgtctctaagacccagtaccagactgaactagcagcaagaaggacgaggaggccgggcatggtggctcacgccggtaatcccagmactttgggaggccgaggtgggcggatcacttgagattgggagtttgagaccagcctggccaacatggtaaaacccgctctctattaaaaatagaaaaatc

SEQ ID NO: 1489 - DNA, 201 bp, Homo sapiens
ctccctgcccctccccaatttccatgctgggacggagcctgatggcctggaccccatggtcacactgtccctgaacctgggcttgtcttttgctgagctgygccgcatgtacttgttcctcaatagttcaggacttttggttcttccccaggctggactcttgacacctcacccttcctgaattccacagtgcaaatatct

SEQ ID NO: 1490 - DNA, 201 bp, Homo sapiens
agccccatgacaggcccctggccctgcctctgtctgactcccagattcagtggttctaccaggccctgaacctctccctgcccctccccaatttccatgcygggacggagcctgatggcctggaccccatggtcacactgtccctgaacctgggcttgtcttttgctgagctgcgccgcatgtacttgttcctcaatagtt

SEQ ID NO: 1491 - DNA, 201 bp, Homo sapiens
atgtcaaggttcgcttcatcgttcgaggctgtggacagtacatttcctaccgctgccaagaaaaacgcaacacctactttgcagagtactggtatcaggcycagtgctgtcagtacgattattgcaactcctggtcaagcccccaactccagagctctctgccggagccccatgacaggcccctggccctgcctctgtctg

SEQ ID NO: 1492 - DNA, 123 bp, Homo sapiens
ggaaaagtagcctaaagtcagtmtaactaaagggtggaacgaggtgggacaaggtccggaattgctgctcagtgatgtgtgtgtgcctgccgctggtggagctgagactgctcatctcagaag

SEQ ID NO: 1493 - DNA, 201 bp, Homo sapiens
ccccatgacaggcccctggccctgcctctgtctgactcccagattcagtggttctaccaggccctgaacctctccctgcccctccccaatttccatgctgsgacggagcctgatggcctggaccccatggtcacactgtccctgaacctgggcttgtcttttgctgagctgcgccgcatgtacttgttcctcaatagttca

SEQ ID NO: 1494 - DNA, 201 bp, Homo sapiens; identical to SEQ ID NO: 1482

SEQ ID NO: 1495 - DNA, 170 bp, Homo sapiens
taggcctccgtctgttgtaccactagcatctatatgacttttgtgtaattttctctcttgaactctggtgctgtttttttgtttgtttgagacaaagtctygcttgcactccagcctgggtgacacagtgagactccgtctccaaaaaaaaggatgaggaatagaattct

SEQ ID NO: 1496 - DNA, 201 bp, Homo sapiens; identical to SEQ ID NO: 1487

SEQ ID NO: 1497 - DNA, 201 bp, Homo sapiens; identical to SEQ ID NO: 1489

SEQ ID NO: 1498 - DNA, 201 bp, Homo sapiens; identical to SEQ ID NO: 1490

SEQ ID NO: 1499 - DNA, 201 bp, Homo sapiens; identical to SEQ ID NO: 1491

SEQ ID NO: 1500 - DNA, 123 bp, Homo sapiens; identical to SEQ ID NO: 1492

SEQ ID NO: 1501 - DNA, 201 bp, Homo sapiens; identical to SEQ ID NO: 1493

SEQ ID NO: 1502 - DNA, 201 bp, Homo sapiens
tggcagggatgcggctcagctcgctgaagaagctggcttccctgaggtagcccgcatggtcagggagagccatggagagacaaggagcccggaaaaccggkctcctactccctccctccagtactgcgagaactgtgacacccacttccaagattccaaccaccgcacatccactgctcacctgctgtcactgtcgcaggg

SEQ ID NO: 1503 - DNA, 201 bp, Homo sapiens
cctccgggctcctgcctcatgaggggagaggtgcggcttggctccgtgcgtagggacttgggtggggtggggtgggcggtgtgagaactggaacgtcccaktgcgctaacctgaggtggtgccagccattctgctcgtccctttgcacttctccatttccccttaggctctaagtgtgaccttcgaaccctggtcagagta

SEQ ID NO: 1504 - DNA, 201 bp, Homo sapiens
cgggcttcaaactgctgctgagggggggctgggagccaggaatggggctgggaccccggggtgagggccgtgccaatcccatccccactgtcctcaagagrgaccaggaaggactaggctacagatcagcaccccagccccgagtgacacatttcccagcttgggatacccgagctgtggctgggagggagagaccccctc

SEQ ID NO: 1505 - DNA, 201 bp, Homo sapiens
tcgagttctgactttggtaaagtctgaccctagtctgctgctgaagtctgaacttgggcctctgacctgggccctttgacttccccttcctgggatctgcycagatgcagatcctgaagtttttggtcaataggctctgtcttcgtgagagacgggctgagagtcagaaataaatcaaccatttgtggtttattcactttt

SEQ ID NO: 1506 - DNA, 201 bp, Homo sapiens
gtgctcactgggtgaagaggctgacttagggcggggaaaggagggagccaggctggatctctttccgcagctctcctcacgttcccctctagtcccggcgmggcgctgctgcccaggggactggcctatcctcggccaatccgctgggtccttattgcctgttgggcccctagtgcgaatcagtcccgccagagacccttg

SEQ ID NO: 1507 - DNA, 201 bp, Homo sapiens
accttcaccccagccactgaccccagcgacctctggaaggatgggcagcagcagccacagcccgagaagccagagtccaccctggatggggctgcagccckagctttctatgaggccctgattggggatgagagcagcgctcctgactcccagagatctcagactgaacctgccagagaaagaaagagaaagaaaagaaga

SEQ ID NO: 1508 - DNA, 201 bp, Homo sapiens
ccagcagcagaagcagtggcagaaggagcatcaggaagacatggacaagggagatcccttgaggctgaggataagatgactcaccggatactgagggcagyccaggagggggacctgccagaacttaggagactgctggaaccgcatgaggcaggaggagctggggggaatatcaacgcccgggatgccttctggtggacc

SEQ ID NO: 1509 - DNA, 201 bp, Homo sapiens
cacagcaacacgtataggagactctccccgagatcttctagggagtgacccatctatttttgtttgggaagaggaaactccgaaatgggatcgcggaagamttaaagggccaggctgatttttttttcctactggtctctgaggctgtggttgctacagggtcaccacgagcttggcttacttgtctcatccttcccttgc

SEQ ID NO: 1510 - DNA, 201 bp, Homo sapiens
agcagcagccacagcccgagaagccagagtccaccctggatggggctgcagcccgagctttctatgaggccctgattggggatgagagcagcgctcctgastcccagagatctcagactgaacctgccagagaaagaaagagaaagaaaagaagaataatgaaggcaccagcagcagaagcagtggcagaaggagcatcag

SEQ ID NO: 1511 - DNA, 201 bp, Homo sapiens
gtgccaatcccatccccactgtcctcaagagggaccaggaaggactaggctacagatcagcaccccagccccgagtgacacatttcccagcttgggatacmcgagctgtggctgggagggagagaccccctcgggtggccacactgagctggagggaggagagaaggagggaggagaaagacagggcttgggagcgggatc

SEQ ID NO: 1512 - DNA, 201 bp, Homo sapiens
agtggcagaaggagcatcaggaagacatggacaagggagatcccttgaggctgaggataagatgactcaccggatactgagggcagcccaggagggggacytgccagaacttaggagactgctggaaccgcatgaggcaggaggagctggggggaatatcaacgcccgggatgccttctggtggaccccactgatgtgtgc

SEQ ID NO: 1513 - DNA, 160 bp, Homo sapiens
gggcaatacagttttgtgctcactgggtgaagaggctgacttagggcggggaaaggaggragccaggctggatctctttccgcagctctcctcacgttcccctctagtcccggcgcggcgctgctgcccaggggactggcctatcctcggccaatccgct

SEQ ID NO: 1514 - DNA, 201 bp, Homo sapiens
aagacagggcttgggagcgggatctaaggacttacatgaacctcgagttctgactttggtaaagtctgaccctagtctgctgctgaagtctgaacttgggyctctgacctgggccctttgacttccccttcctgggatctgctcagatgcagatcctgaagtttttggtcaataggctctgtcttcgtgagagacgggctg

SEQ ID NO: 1515 - DNA, 201 bp, Homo sapiens
actgaacccggagctttgcgcacgcccgagccctcaagtaatgtgggttgtggtttttgttgttgttgtcgccacgcatgcgtcttcgtgccgtgtggctwtttgattgtgtcaactcttctgattagaatggcgccattttgcggtacggaagctacacagcaacacgtataggagactctccccgagatcttctaggga

SEQ ID NO: 1516 - DNA, 201 bp, Homo sapiens
ggtggggtggggtgggcggtgtgagaactggaacgtcccagtgcgctaacctgaggtggtgccagccattctgctcgtccctttgcacttctccatttccycttaggctctaagtgtgaccttcgaaccctggtcagagtaatggtgaggggcaggcgtgacgttatttcattacacggcttctcggcattccacaggttt

SEQ ID NO: 1517 - DNA, 201 bp, Homo sapiens
gagacaaggagcccggaaaaccggtctcctactccctccctccagtactgcgagaactgtgacacccacttccaagattccaaccaccgcacatccactgytcacctgctgtcactgtcgcagggtcctcagcctcccaaccttccacttggggtgcccatctccagcccgggcttcaaactgctgctgagggggggctgg

SEQ ID NO: 1518 - DNA, 201 bp, Homo sapiens
gattagaatggcgccattttgcggtacggaagctacacagcaacacgtataggagactctccccgagatcttctagggagtgacccatctatttttgtttrggaagaggaaactccgaaatgggatcgcggaagacttaaagggccaggctgatttttttttcctactggtctctgaggctgtggttgctacagggtcacc

SEQ ID NO: 1519 - DNA, 201 bp, Homo sapiens
gtggtgccagccattctgctcgtccctttgcacttctccatttccccttaggctctaagtgtgaccttcgaaccctggtcagagtaatggtgaggggcagkcgtgacgttatttcattacacggcttctcggcattccacaggtttccctccgcctcctgagggcctttcctaacccacagagtggattcctggctccaga

SEQ ID NO: 1520 - DNA, 201 bp, Homo sapiens; identical to SEQ ID NO: 1510

SEQ ID NO: 1521 - DNA, 201 bp, Homo sapiens; identical to SEQ ID NO: 1511

SEQ ID NO: 1522 - DNA, 201 bp, Homo sapiens; identical to SEQ ID NO: 1512

SEQ ID NO: 1523 - DNA, 201 bp, Homo sapiens; identical to SEQ ID NO: 1502

SEQ ID NO: 1524 - DNA, 173 bp, Homo sapiens
ggcccgggagtctgggcaatacagttttgtgctcactgggtgaagaggctgacttagggcggggaaaggaggragccaggctggatctctttccgcagctctcctcacgttcccctctagtcccggcgcggcgctgctgcccaggggactggcctatcctcggccaatccgct

SEQ ID NO: 1525 - DNA, 201 bp, Homo sapiens; identical to SEQ ID NO: 1504

SEQ ID NO: 1526 - DNA, 201 bp, Homo sapiens; identical to SEQ ID NO: 1505

SEQ ID NO: 1527 - DNA, 201 bp, Homo sapiens; identical to SEQ ID NO: 1514

SEQ ID NO: 1528 - DNA, 201 bp, Homo sapiens; identical to SEQ ID NO: 1506

SEQ ID NO: 1529 - DNA, 201 bp, Homo sapiens; identical to SEQ ID NO: 1517

SEQ ID NO: 1530 - DNA, 201 bp, Homo sapiens; identical to SEQ ID NO: 1507

SEQ ID NO: 1531 - DNA, 201 bp, Homo sapiens
ggagagaatggcgccattttgcggtacggaagctacacagcaacacgtataggagactctccccgagatcttctagggagtgacccatctatttttgtttrggaagaggaaactccgaaatgggatcgcggaagacttaaagggccaggctgatttttttttcctactgcaggtctctgaggctgtggttgctacagggtc

SEQ ID NO: 1532 - DNA, 201 bp, Homo sapiens; identical to SEQ ID NO: 1508

SEQ ID NO: 1533 - DNA, 201 bp, Homo sapiens
cacagcaacacgtataggagactctccccgagatcttctagggagtgacccatctatttttgtttgggaagaggaaactccgaaatgggatcgcggaagamttaaagggccaggctgatttttttttcctactgcaggtctctgaggctgtggttgctacagggtcaccacgagcttggcttacttgtctcatccttccct

SEQ ID NO: 1534 - DNA, 201 bp, Homo sapiens; identical to SEQ ID NO: 1502

SEQ ID NO: 1535 - DNA, 201 bp, Homo sapiens; identical to SEQ ID NO: 1503

SEQ ID NO: 1536 - DNA, 201 bp, Homo sapiens; identical to SEQ ID NO: 1504

SEQ ID NO: 1537 - DNA, 201 bp, Homo sapiens; identical to SEQ ID NO: 1505

SEQ ID NO: 1538 - DNA, 201 bp, Homo sapiens; identical to SEQ ID NO: 1506

SEQ ID NO: 1539 - DNA, 201 bp, Homo sapiens; identical to SEQ ID NO: 1507

SEQ ID NO: 1540 - DNA, 201 bp, Homo sapiens; identical to SEQ ID NO: 1508

SEQ ID NO: 1541 - DNA, 201 bp, Homo sapiens; identical to SEQ ID NO: 1533

SEQ ID NO: 1542 - DNA, 201 bp, Homo sapiens; identical to SEQ ID NO: 1510

SEQ ID NO: 1543 - DNA, 201 bp, Homo sapiens; identical to SEQ ID NO: 1511

SEQ ID NO: 1544 - DNA, 201 bp, Homo sapiens; identical to SEQ ID NO: 1512

SEQ ID NO: 1545 - DNA, 160 bp, Homo sapiens; identical to SEQ ID NO: 1513

SEQ ID NO: 1546 - DNA, 201 bp, Homo sapiens; identical to SEQ ID NO: 1514

SEQ ID NO: 1547 - DNA, 201 bp, Homo sapiens; identical to SEQ ID NO: 1515

SEQ ID NO: 1548 - DNA, 201 bp, Homo sapiens; identical to SEQ ID NO: 1516

SEQ ID NO: 1549 - DNA, 201 bp, Homo sapiens; identical to SEQ ID NO: 1517

SEQ ID NO: 1550 - DNA, 201 bp, Homo sapiens
gattagaatggcgccattttgcggtacggaagctacacagcaacacgtataggagactctccccgagatcttctagggagtgacccatctatttttgtttrggaagaggaaactccgaaatgggatcgcggaagacttaaagggccaggctgatttttttttcctactgcaggtctctgaggctgtggttgctacagggtc

SEQ ID NO: 1551 - DNA, 201 bp, Homo sapiens; identical to SEQ ID NO: 1519

SEQ ID NO: 1552 - DNA, 201 bp, Homo sapiens; identical to SEQ ID NO: 1510

SEQ ID NO: 1553 - DNA, 201 bp, Homo sapiens; identical to SEQ ID NO: 1511

SEQ ID NO: 1554 - DNA, 201 bp, Homo sapiens; identical to SEQ ID NO: 1512

SEQ ID NO: 1555 - DNA, 201 bp, Homo sapiens; identical to SEQ ID NO: 1502

SEQ ID NO: 1556 - DNA, 173 bp, Homo sapiens; identical to SEQ ID NO: 1524

SEQ ID NO: 1557 - DNA, 201 bp, Homo sapiens; identical to SEQ ID NO: 1504

SEQ ID NO: 1558 - DNA, 201 bp, Homo sapiens; identical to SEQ ID NO: 1505

SEQ ID NO: 1559 - DNA, 201 bp, Homo sapiens; identical to SEQ ID NO: 1514

SEQ ID NO: 1560 - DNA, 201 bp, Homo sapiens; identical to SEQ ID NO: 1506

SEQ ID NO: 1561 - DNA, 201 bp, Homo sapiens; identical to SEQ ID NO: 1517

SEQ ID NO: 1562 - DNA, 201 bp, Homo sapiens; identical to SEQ ID NO: 1507

SEQ ID NO: 1563 - DNA, 201 bp, Homo sapiens
ggagagaatggcgccattttgcggtacggaagctacacagcaacacgtataggagactctccccgagatcttctagggagtgacccatctatttttgtttrggaagaggaaactccgaaatgggatcgcggaagacttaaagggccaggctgatttttttttcctactggtctctgaggctgtggttgctacagggtcacc

SEQ ID NO: 1564 - DNA, 201 bp, Homo sapiens; identical to SEQ ID NO: 1508

SEQ ID NO: 1565 - DNA, 201 bp, Homo sapiens; identical to SEQ ID NO: 1509

SEQ ID NO: 1566 - DNA, 201 bp, Homo sapiens
aaacctgtggaatgccgagaagccgtgtaatgaaataacgtcacgcctgcccctcaccattactctgaccagggttcgaaggtcacacttagagcctaagrggaaatggagaagtgcaaagggacgagcagaatggctggcaccacctcagctgacgtgaagatgagcagctcagaggaggtgtcctggatttcctggttc

SEQ ID NO: 1567 - DNA, 201 bp, Homo sapiens
tccgatggcctaccagctgcagctccaagccgccagcaacttcaagagcccagtcaagacgattcgctgattccctcccccacctgtcctgcagtctttgwcttttcctttcttttttgccaccctttcaggaaccctgtatggtttttagtttaaattaaaggagtcgttatcgtggtgggaatatgaaataaagtagaa

SEQ ID NO: 1568 - DNA, 146 bp, Homo sapiens
cctcccccacctgtcctgcagtctttgacttttcctttcttttttgccaccctttcaggaaccctgtatggtttttagtttaaattaaaggagtcgttatygtggtgggaatatgaaataaagtagaagaaaaggccatgagctag

SEQ ID NO: 1569 - DNA, 201 bp, Homo sapiens
tctggagccaggaatccactctgtgggttaggaaaggccctcaggaggcggagggaaacctgtggaatgccgagaagccgtgtaatgaaataacgtcacgmctgcccctcaccattactctgaccagggttcgaaggtcacacttagagcctaaggggaaatggagaagtgcaaagggacgagcagaatggctggcaccac

SEQ ID NO: 1570 - DNA, 201 bp, Homo sapiens
tctgtgggctccgtggcaatgaattcttctgtgaagtggatgaagactacatccaggacaaatttaatcttactggactcaatgagcaggtccctcactaycgacaagctctagacatgatcttggacctggagcctgatgaagaactggaagacaaccccaaccagagtgacctgattgagcaggcagccgagatgcttt

SEQ ID NO: 1571 - DNA, 201 bp, Homo sapiens; identical to SEQ ID NO: 1567

SEQ ID NO: 1572 - DNA, 146 bp, Homo sapiens; identical to SEQ ID NO: 1568

SEQ ID NO: 1573 - DNA, 201 bp, Homo sapiens; identical to SEQ ID NO: 1570

SEQ ID NO: 1574 - DNA, 201 bp, Homo sapiens
gtgatagactgcctcttcctcaaggaacaaacaacaaatggctctgatggtttgtagcctgcctaattggaagaaaggcaacacagaagtttgagagcccrtctagtccagagaaggggcctctggacagaggtgggaggagtgggggacagagtggtatgggttgggctgcgaagggagttgcctcttctttacatctac

SEQ ID NO: 1575 - DNA, 201 bp, Homo sapiens; identical to SEQ ID NO: 1570

SEQ ID NO: 1576 - DNA, 201 bp, Homo sapiens; identical to SEQ ID NO: 1567

SEQ ID NO: 1577 - DNA, 146 bp, Homo sapiens; identical to SEQ ID NO: 1568

SEQ ID NO: 1578 - DNA, 201 bp, Homo sapiens; identical to SEQ ID NO: 1570

SEQ ID NO: 1579 - DNA, 201 bp, Homo sapiens
aggcgctgggttcctggaaccccaagggagcactgagctgagtaagtttgttcctgtcaattgggaaccccctcaaccacttccattccccaaatacctgygctgctaccgatgcctcttggagaccaaggagttagggtgccttctgggatctgacatctgcctcaccccagctggcagcagctgcatcactctccacaa

SEQ ID NO: 1580 - DNA, 201 bp, Homo sapiens
tccttagtgtgactgcagcaaactttggtgtaaaattccaccagtttccagccaccttcctgacttctatctgggcttggccaggacttctagtccctcayaccagccctccttgcctccctccagccactggaccccagccttggctcttcctcttggttgacgcccttcagcacacttactgctactctgtacccccag

SEQ ID NO: 1581 - DNA, 201 bp, Homo sapiens
ggatgaggtgagggaaggcgctgggttcctggaaccccaagggagcactgagctgagtaagtttgttcctgtcaattgggaaccccctcaaccacttccaytccccaaatacctgcgctgctaccgatgcctcttggagaccaaggagttagggtgccttctgggatctgacatctgcctcaccccagctggcagcagctg

SEQ ID NO: 1582 - DNA, 201 bp, Homo sapiens
ggtcctcttaatagtgctggtcatgatgagcttggtgtttggtaagtttgttcctgtcaattgggaaccccctcaaccacttccattccccaaatacctgygctgctaccgatgcctcttggagaccaaggagttagggtgccttctgggatctgacatctgcctcaccccagctggcagcagctgcatcactctccacaa

SEQ ID NO: 1583 - DNA, 201 bp, Homo sapiens; identical to SEQ ID NO: 1580

SEQ ID NO: 1584 - DNA, 201 bp, Homo sapiens
ccaagccctctacacggtcctcttaatagtgctggtcatgatgagcttggtgtttggtaagtttgttcctgtcaattgggaaccccctcaaccacttccaytccccaaatacctgcgctgctaccgatgcctcttggagaccaaggagttagggtgccttctgggatctgacatctgcctcaccccagctggcagcagctg

SEQ ID NO: 1585 - DNA, 50002 bp, Homo sapiens
tcttgctgctgctggccaacccctggctgaccacgagcaggcctgctttgccaagtgcgagcgcacacgggaaagggcaggctgcctccctgatggccctggtgacagcagggggccctctcttgtctccatgcaatgcagggactggcacctgctaccctcctcctggaactcagcactccaagttgctgaggacgtggggcaagcaagggccccaggaacccaaaatgtgagccgtttcacttgcccctccttccgtcttaggggcatcaatcactgcttccctctccagcagtacccagcagtccctgtcagggtccaggcagggccaggcctccacccctcgatgacctgatgtgtgcccttggaggggcgtcttcctgggaccggacttcaggccattatccctgacactggtggcgtgtgaatgactaaactggccaaaaataaaagcccccataaatctcctattttcctataagctgtcgggtacacagagtgtgctgggattattgatagamaactttatggatgggctgcatcttaaaatcaaaatacattacccaaaatcartgttgccgtacatggtacagggaggacaagaaaggtcatccgagacaagaatactgaaacccaactccaagaggacctgagcattaaaataaataaattttgaaagtgagttccaggaaaaacactcacttagggctgtaatttaagggtgctttcacaagaggctgggcagtctttttaaatagcgctttttaaagtgcctctgagagtccagtgaatccatccacaaaatggtattgacaagcaccccagctcacagccctatawtaacagctcatgataggtaatgagtgagagccccgaggctgggcacacagtagccaggccctggcagaagcaagccccccgggcacagccaactgggcagggcagccaacccatggccccatcaaccacattacaagaggatctgcctccaggtctctgtgcacagcgaccccacaggcattttatagctgtggatggagggaggggaaaaccrtgttagttcccattgatgattaatcaggactagaaacaaaatgatcatgaaatactctcaagtccatagcttcacataaccacgattcactgcaaacaggtcatctttgtaggagcccaagagataccacagtaggtagacctgaatggctgtgtccgcagagcttagtgtccctttgggagaagtgacacrcatgctcctccccagccaccttctttagagtctccaactgagagaccacatcccaccaggacttagtgagaaggaaatggctcccctgcagggagtggggagccaggcttggcagagactggcagggaaggaacccagtgccctctgactggcaggagctgcagtctggtcttagctcactaatcctccaactagccaaagggctaagtcgaagagacaaaatccctgccctgctcacagaaaacccacagcaaaagggaggcaaagtgctcctagcagggttccctgtccgaatatttgctaggctctaactatgggcaggcccagctgggagttaaagacacagagaaagccagtgtggtggctcactcctataatccyagtgctttgggaggcagaggcaggaggactgtttgaggccaggagtttgagaccagcctgcacaacacagcaagaccccatctctacaaaaaatattaaaaataaaacattagctgggtatggtggcgcatgcctgtagtcctagctacttagaaggctgagacaggaagatggcttgagcccaggggttcaagaccaacctgggcaacacagcaagacctcacctctacaaaaaattttaaacaaaattagccaggtatagtggtgcatggctgcagtcctagctacttggaaggctgaggcagaaggatcgcttgagcccaggcattcaagaccagcctgggcaacagcaagaccccatctctacaaaaaacattttaaaaattagctgggtatggtggygcatgcctgtagtctcagctacttagaaggctgagacacgaagatggcttgagcccaggggttcaagaccaacctgggcaacagagcaagaactcacctctacaaaaattttaagcacaaaattagccaagtgtgatggtgsatgcctgtagtcctagctacttggaaggctgaggcagaaggatcgcttgagcccaggggttcaagaccagcctaggcaacatagcaacaccccatctctacaaaaaawatayatatatattagcaaggcatggtgggctaatcctcctggtgtcagcatgataactctggaggctgaggtgcttgagctcaggacgttgaggtgcagtgagctaagatcgtgccactgcactccagcctggacaacagaaaaagaccgtgtcaaaaaaaaaaaaaaaaaaaaccayagtgaargtgggtcagctgctctcatcacagtctacaaggcagggcagaaaacagatagaccaagctgaacagacaggaaagagactacaagtctagctcaggctgctccttgctccyatcagtcaagggtagggccttgctctccacaccaactcgaggcatcaggaccaggggctcacctggaggagggaagagcttagtgttttggttaagatccaggaccccagagtaagacaggctttgggttgatgcgtcactcagccacttactaactatgtgaccttgggcaagttccgtaagcttctgagcttcaaccataaaatggagtgaaatcaccatgtctacccctggagttgtgattgaggtaaaatgagctcattcattcattccacaagtatttactgagctcctactctgtgcccgaccctgttgtaggcgctagagatacatcagtgaacaaggcaggcacagtcttagagacctgcaacaagacactcaataaataaggatgtggtcccatgtgttggaagatggctggcgaaatggaaaaaataaaggaagcagagtgagggcctgggagtgctgggtggtgggaggagaggcagtgtagactgcagtgttaaatatggtggcccaggtgggcctcatggagaaggtgactgcttgacaaaaaccagagcacaacggagttagccaagcaagwatctgtgggagaagcatgtcaaccagatggtgcggctggtgcaagggccctggggtagaagcatgcccagtgtgctgcattgtaggaaggagaacagtgtggctaggggagtgtgagctatggagaagacagaaaagatgagaagatgaaggaaaagggtgagcaggaagcagaaaggcagatggtttgaccttggcagccactgcaaggccactggtgtttatgccaagtgaaatgggagccactgtggggtttttcagcagtggaagagggatctgatttccctgagaaggatctctttgtcatgttgagaactgatgcctagaaagtgtctagtacatggaaagcatgtgaaaacatgtatctgtcgctcttagagtaataccaactcatgcagtgggcaagaaacacccaaccccacaaggcggtacagggataaattacttccagataattccctctagctacagggattctcccacgggcatcgctggtctccagcattagcctctgcttggatctggcatcaggaaaggaractgctacctctccaggtgggccactgcgcagtgggctagctctttcttcagaaccctgcttggaatcagtccccaaatgagcctgctttcctggaaccccgctgtggtcctgaatctgcatagagcggtgcaagtctgccctctcccttcagaagctgaggacagcaatggggcctggcagggtcttacattcgggggtccaaagtggtttctaagggcacatgggatttcctaggaaaagctcctgccatgacagaaggagctggcaactgcctctgtggagcccctagagaggaacttgagggaaaggaggaaagtcctataggacccccttcttccctttgcccccagcaggagaccttagaaaacaagggcttgatagatgagccacagtgagccagggggtgggagtgactcctgggccatagacgaggaaactgaaaggcaggcactggaggcaagaagggctggcccsgrgcacccgctggcgaggacagccttggagagggcctgcagctcctcccctctgagctgtgctgcgctggccgcctggaccagggtggctgctggagagtgttttccctctgggtttccttctccttggctcccagggaatcctctggcggtgcctccgggaggctggtagccggggaagcaggcacgtgaatccaccgggctgccccaccccaacctgaggtcagagctgaggcgtaggggccggggtaggggcagaggtgccgaaacgcactagctggggactcccgggggaaggagataggagagacccaaggcgagccttaggactcgcccctatgactatgactacgcgctgcgtccgaaccacatgtccaccccgcatttgccttcggggaccagaccgcgctccctcagatggctggggagggagcagactccgggtgaaggctgggggaggtaccgggatgccgagtacgccagagcaggcgggggatgggttccggcttcctgccgcctcggcatctcgctttgcaccgggcaaagaaggggccacgaccggcgaagagcgcgtggagacacagggacccgcgatccaggggcaggaaccccgccccctcccggaaacctcccgggccctgagtcgtgcccggcgctccccaccccaccccacccccgccgcccctgccgtcactcacggccgctgcgggctggctagcgtgtgcgctctccgcgccgcaggcacctgctcgctgggcgctgtgcgctcacttctccctcgcgcactgcagactcccggcgctgccgccgccacccagcgtagtctccggctgggcacagcgttccgcccttctcgcggccccgggcgcccacccatccgtcatggcccaggcctgggccaaacagcggggcagctggttgcccaaactggggtaaggagttgagggctgggagctgcagagaggaccgagggacacacggggagcagggatgagcggccgtctcgagccgtgcagactgggaagaagccagggagagtttgggtgggaggactcccaacccaagcgggtgcggggcggggctgtactccaaccagaaagacggtggtccctccgagcgacccccgaggagagagggggagcgctctggggcgggggcggggcgggctgtggcaggagaggggagggcgggggcgatgcagcggtggaggcggcttggcgcccagccactgaccgccccctcccttcccctcccctccccctctccccgcctctctccggctccgggtccgccacgccggacccgctctccccgcgctgcgctgggtcggacgccaggtctgcgcgccgcggctgagcgcccactcgccctgcggaaagagccgcggaggaaccggcgggggcggctgcgggagccgaaggaggtggcaatcgggagcagaaccagaaggagacagggaggcagaagctcgcggctccgtggcacgcactccctcggccagggatgggtcccggcgcggcccagcccctgcccggcccgccgggcagagactgaaccgcggatccccaccgtcctgtggacgaccggacagagagaggcactgaccgatcgccagcagcctcccggtgggaccgcgtctcctgcacaccccgcgcagcgccccccgccggagccgcaccgggcaagccggcgagggagcggggctgattggcggccgccggcggccaggggagggggcgccgcgcggggccatggcaggctcggaggcgtcctagcccgagccggagccgatccgagcccacgcggccgccgcctctccgctcccgggcccccgccgccaccgcgccccccgcgggagatggaacagcggaaccggctcggtgccctcggatacctgccgcctctgctgctgcatgccctgctgctcttcgtggccgacggtgagcgcgggaactttgctgccgctgtggactcgggggggtctttgctggggccgccaccgagaagaagaagaaagagaacgaaccgggaagcttcgcggtctccagcaatcccgctgtgcagcctgggcccggaggggtagggagaggcgagcggcgaagggtcgccgcagcagcagcgccgcgcccgagtcgttcccagtcccgccggggccccggctgcggaaaggatgcctgcggggagcgggagtaggcgcgccccagccaggctctggcggtgcggccaggggcgggggagaagcacgagtcgcccctgccgccccgccccatccggagggaagcagtaggcagccgatggccggtccctgcctcggccctgcagccgcttccccgaactttgctagcccctccggccgtgcgccagggagcagctgcggggtggggggcacaaggccagccagccagagaccgactgcctckctttaggttgccccaggcccccgacctacagctggtcacgcctctctctctctccccacccccagctgcattcacagaagtccccaaagatgtgacagtacgggagggagacgacatcgaaatgccctgcgcgttccgggccagcggagccacctcgtattcgctggagattcagtggtggtacctcaaggagccaccccgggagctgctgcacgagctggcgctcagcgtgccgggcgcccggagcaaggtaacccgccgcccacgcggtaccggcgcgcgcccggctcgcgcccggggcggcgaaggctaacccrgggagggaagcagcgggyttcactcgcgcagggcgccgccctgtggcgcagcccatcttccaccttcgcatcccaaagcatcttcaaagtcagcagtggttacccccaaacctgtcaattattttgacagcatcgctgttcccaccacctcccagaactccattcacgcccagcccctaaagagccacacctcagcctggtcgcttgctcgtgctcgctggctgcggccctctgatgggtgctgggtagtgaaggaagcccccttggtcccatcaggctctccccgccctctgccactttgaggaccccagggctcccacggctgcgttccagaggccaccagaaaaccgagtaccggaaagccggcaggacctccagccctcaggggcacagaggggccacttctctgtggccgaaaacaggcccacgctgcctgtctgcctcaaaacccacactctcttacacactctagtgtgctcgcgtgcacacacacctacacacacacctacacctacacacacctacattctcccagggtcccacccagagttactcccactgagcctcccgctgggtgctgtccagacacagcggccctccctccagttcttcacggctcccagtgagctgggggaggattttgagccacgcggcagggcctaaggatgcccagagggaaggagaggggctttccttcccaccctggtgtccatccagtctccccagttcagccggcaggtgtgcaccagggcagccacccgttggtcaggcaccatgctagctccaaagcccgcttcctcctgggaaactcttggaaagccggacgtcctttgtgccctcaacccccatcccccgggcggtttcggtcctagcctgccggaggagggtgcccttgcctaaaggcggatccgagttcccctagccagaaggccgcgagcctcacgtctctctctccctctttgcattttaggtaacaaataaggatgcaactaaaatcagcgtaagtgtggagcccagcgcgggccgcgggagaccccttctggccgcctcgggtcccgcagctccctcccttagcaagccgcggcggccgcgcatgtggggccgcgcaagtagggcagcgatcgcagccttgcatyggtggctgctcggcgtgtccgggcgccatctgtcgccggttgcagggtcgggttctcttttgtgtaaatcaagggtccaaggcttgagtcccctaattcggctcggcgctgacctgtaaaactccccttggtcggactgcgcgcttagggcctctcgcgcctgccagcctcygctctgcgggcattcctcctagcaccgggagcgcgcggctgctcgccctcgccgcgaccgtggcgccagcttcccgccccctctgccccgccctgagcatctgctctgcgccctccgctgcaaccctttatcctccgcctggattgcgggtctggstgcggkgtgttgcaggcttgcaggggacggggtagggggtggttgtgccaggctgcgaggggcccgggtcatggggttgctaactctgggaggagatgcgcccaagcttcccacctggagcgtagaaaggcctggagatgacgaagcctcctcgtgggctcggttcagaggtgagggctccctgggtgtttgttgagagccgtagagcagtacttcccgaagtccccaccggggcgcaggggaggagcacttcgctggggggcttctggagatcccgcggaaaggcgggttggtagcaggtggccagggagccaggcagcagcctcagcgttgcttgccttcttaagaaagcasagtgttagctgtaaagggcggggtccggtgacagggtggctttccttaggaagcgattcgggcaggccctccgtgctccgggaggtgaggagggccggctggggcgggactgtcggttggagcgcgtcggggcgggaaagacgtggggaagttaaggaacaaggaatccagcctggggtttcctgaaggtgcaggagggaggaaggagaggtggactctgcccttctgaagcgccagctacgggaagacaagcagtgttggtttgtatgggcggggcagatgcaaggtgggcgtttggttaacgtgatggggacgtggggacacagtccaaagagctggctgcctggcgtccacgcagagttggaagccctatgccactgggtagacgcgggtgaaagggaagccggatcgtgatggtgggcaaaccaggatccgggaagtgttggggtgcgcggatgagggggcgcgacggccagggtggccagaagagyaggtttgggagctgcccagcccggcctctaaccctgctctcttgcagaccgtacgcgtccagggcaatgacatytcacaccggcttcggctgtctgccgtgcggctgcaggacgagggcgtgtacgagtgccgcgtgtcggactacagcgacgacgacacgcaggagcacaaggcccaggcgatgctgcgcgtgctctcgcgcttcgcgccgcccaacatgcaggccgccgaggccgtgtcccacatccagagcagcggcccgcgtcgccacggcccagccagcgccgccaacgccaacaacgcgggcgccgcgagccgtaccacctccgagcccggccgcggcgacaagagcccgccgcccgggagccctcccgccgccatcgatcccgcagtccccgaggccgcggcagcctcggcggcccacacgcccaccaccacagtcgcggcagctgctgctgcctcgtcagcgtcgccgccatcgggacaggcggtcctgctgcgccagaggcacggctcgggtaagggatcgcggagagggggcgcacgcgcggggatggcgcagggctagggctgcgccgggacgccccggggggctccggacccaggacccgccccctgggcgcatttgcatatgcatactccttcctagttaggtcgggagcgcccccccctagggccttcttcccgcggtttctctgtctttactcctggcctctggaagcatttctgatgtgcatttatgaatggaggagggggctgccctgccagctacctcagggtacgctggaggctgtagtgtggggaggcgacctcttttgggtttggagaactggaccctgagggctgagctccgatggtggcaaggggccagtactcagccaccaccggtggtggaaatgagctatccccagatgggggcactggcacctgctggagagcgggaggcggttaaaacttgagttgcgttggtttctattttgtgtgctcgattgaacagactttgtccaagggtgtggaggggcctggctgtgtaacctacgccctctttggctaaatgcaggatggccctaggcagcagctctgcactctgctgtaaatcgcagatcctctccctttggctttggggtgggggcagtaaggactgagccctaagccactgttaggaaggcacccagaggggaaggcttgctttcttagggagctgagaggctgggagaagggattggggrtggggggcgggatgtgagaaggcagaaggaggagaaaatgatggcttgactaccccctggtaggcagctctggggcggtaggagccattggcagaggcaggggtgggggcggtggggggcggttatggagggtagaaaggcttgcccagtgtgcccctcctcccaaggcatcccccactctctccccctgctccaagctgggcctcagagcccaccccagtgcctgactgtgagcaggttgctccctcccttggcccctctcctcagtcttgtttgatgcagagtcccacagggagcatctctcctggccacatggccctgggagcctggctttgggtacaggtgcatgtgaaacttcctagatgtgatggagcacattgtcacacccctacagtggtagttctcaaagggtggtcttcctgcaggctcctggactacctgcagaatccgctggggcaggtcttcatgtccttagtgtcaccatctcatcctgcctccctggctaactctcaagccctcygacagttgagcctgcagtctgcctggcacatcagttcagttctgtctctcatttagctctacccactgtagcagccgcctcagtgcgtctcaggctattggcttgatccgaaggcctcatccgtcttggatgccacacaggagcccacaagactgtccctcaggctactggggaaggtagggacctgcaaagagcctccacagcccagctgggaactttccaccctctgcactaagatatcactaggtgctgtgacaaataaaccccaaaaggccagtggcttgacacaattcaaatttaatattcctcgttcatatcaagtcctgccctggagtgccccagggcatgtggcggctctgttccatgcagtcatccagggacccaggctgagagtaccagcctcagcaggaggcttccaaagtcactctgggcatgacatagagccagcagaccagtgaggagagacagaagcagcccttgtcagctcactgccctaagagaattaagccctaatactctcaggcatgcattgtgtatgatgaatcaacttgtttcatatgcatttaggacggccctaagtatgtatcattcttgggagactgagaaaacagccactcaaatctttctggcagcgcttaactctctcagagaaaagctggtttagaaaaatggcaaggcgttttttaagggctaggtctagaagtggtaaatattacttctaccctcttccatcggccagaactcagtcacatggtccaacatggatgtagggcccgctgggaaatgtagtccttggtgtggcggctgctttcgggcctcatctcttcacagtgcaaggggagcgtgactcttcgaggagttagccatctctgttcagcatacaggcagtgctcagggagagttcctattgacttacagagccattggcttaactgatgcttgttggtgaagagaacatccttcttccccctccccttgggccccagcaaggaaatgtgtgcattacaggctgggacgtacctctaggatattcctggaggatttgaaaggcagaagttccgatgtaggttgtgcttccaccacttactggctgtgtgattttaggcaagtgacttaccatctctgagtcatctgtaaaatgaacaggataatctctctgacctcagagggagcttggtatggaaattgctgcacatatatgttcattattatcaccctggtcattagctgcactagctggagaggagaggatgggcagataaagctaaaaggttggcagttggaagccaggctatggagggccttgaatgccaagtggaaccagcagttggttaaagaccggtcaagaccatgtgaaatagatctttgagagtggacttggttgtgctcacaaaatgataatgagaccaaggtcatgagcgcactcctgcttgaatctccctcttcccttggccttcagcctgagtcccaggcccagccacagatgacctgactgcctgccatagccagtctgatctccagtctcggtgctggccatggaggctgaatgagagagtgaagatgctccaggacatctcatccagggaaggtgggccagtcagtgcccttcttcccagaagatatggaggtcctcaggtcaactcaatgctgatggcacagtgcccagtgccatcccagcagataggaccttgggcacccaccagccacggggccatatgttaatgcccatgtgggtcactctgccttccctggaggggctgatgtccactgccatctagaaagcacagcttgcctggatcccagcggggctgacagcagcacccctgggatagaagtacagtggcctctgaggtctctgtcaccccctaacccttgccagctcctgaactggccaggaactgtgtagacacatctcagaaagaacctccagtctctctccaagtctcctttggggtgcccagaaggtgggccttcagctgggaggtcagaaaacctgtgtccctcactctccaggtgaagctctcttgagagtggttctgctccaggcactctatgtcccactctgggcacggaaaatggatggcagacctgtcattcacaaacacatccgaacagccttgatgccaaggagggaaccatgctcagtcttgtgtcccacctcaccccggtcacccaaggccacccaggctgtgtgctgtcaatgtgaagcctgcagactgtgttttggaggatgggcattagtaacctttctgtagggctgcatcaccagccagtgccccgagctcagctgctggcaccaggtmctgctgagcgccctgagaggcagcaagccagctgctttgctcrgaaccacagcagcctgagctgcagagggagctcggggcagacgaccttgggccttgcctcccagccactcaattctaggcagcttgatggggaggggtccagaaaggaccgctgcctcttggttaatagtcaagagtgtttgcagaggatatcaaccagggtgctggcagaggcacatggaacattcaaacagggtcactgggggggatggaaagagcgtatgtaccaaggtgtggacagggttagggcagccaacaaaggattgatgcaggtccccggggctggcatcagtgggagccatcagcagacctagcctaaaggtctgggggcagctggtagcacccagagagtaggaggggaggcacacagccaacccacagtcacccagcaaggatctcactcctcctgccctccattccctgtctgggcctccctttggccaaaccctcctggaacctgaaggcaggggcacccaggtggtgcaggctgtagaggtcagccctcaggggctcacagcagagtggagaagggtgggctgaggacctgggggcactgaagaggctcatggccaggcacagtggctcacgcctgtaatcmcagcactttggaaggccgaggcgggtggatcacctgaggacggaagtttgagaccagcctggccaacatgatgagatcctgtctctactaaaaacacaaaaaattagctgggtgtggtggcaggcacctgtaatcccagatacttgggaggctgaggcaggataataacttgaacctgggaggcggagtttgaagtgagccgagatcgcgccattgcactccagcgtgggcaacaagactgaaactctgtctcaaaaaaaaaaaaagaaagaaagaaagaaaagaaaagraagaggctcaggacactggccatttcagattggcaacagcaggggcggtcccagtacatctccccaaatagtsccccattaagcgatcgttcctggaaggaagtcagaaaaaaagtccctattttttaagtgagccactttggtaatgycacgaaggagagaggggggacttcctccagccctcatccattagctaccgcacagccaggcaagaaagcccttcccatgccacatgtgtacctaatacacccaaatacatatttgcactaaaagttgatgtgcaaaaactcattcatttcacgtctcatttgtcaagagacattttggtatttgtgcttaaaaataaacatggactgsattagcagagcagagcaggcgcaggaggctgggccccgtcttagctgtgttcataaatctggctcctaattaatctgaatgctgacccatttttcgtgaacactttgttgctggttgccatttctagaaaagagagagagagaccaagcagagtatcttccagactaacacttctaaatggaaaaggcaccgcagtaaagtctagcgcggcctcaaaagaatccagtttgcaactgaatggctggtgtgttggccagaggttcccctctgcagggacsttgggatcagagcagtggcgtgtgaacctctaattagcctcagggctctggctccaaggaaaggcaccatggcccccacagagagccggctggatgtggcaagctgctgctgggtgcccacacggagaactggctctcaatatttcaattaataatgagagaaagacagccaaggccatgggtatgayggctgtagagaggctgtggctgctgggagccgtcaaaggggagcatccgcggatgtcgccatggcaaccgtaaaccgtgaccaaagggggccgtgggcaaggtggagacagtcactacatctcgacccatgccccggtggtgatagagctgaaggaatggcacacacgtgacccaggagaatcgcgatgcagcagagtcaccagcagtaccagcaggcccaggacctgtgggccctgagcaagccattgaggcagccayctggttttcccatctccccggacccacgaggacccaaaggccctcaccttaaatgaacaatccactcttcccccaagttccgatgtgacatgagaattataattaagaagaaaacaaatctggcaagggatgtcccagagaagagagggcgaggctctctgagcatcctgaaaaagaaaattaaaggatttcataaaggaaatggctgagcctcacagctggcaagcaatgcctgcttcatccctaacagcagcaatcttacgccattatcagcgacatggcatcctctcccccagcagccagtcactgggagccttctgggcccagccccacgcttgccatragggggaaccagagatggcagtgtggacccaaacttaraggagccagggcacccaggtaattycaggacaaagcagtctgtgctgtgccagcactaatccagctgaggcaatcaggagaggcttcctgtaggtggtgtgtgacttacagcttgaaagaagcacctgaggctgaagtcctcccaattaggtcagaccttggaaagctttcagatgycccctctctccttcccaaggttggagaagtccacaccaaatggaatggcctttgtgtatcagtcagctcactgggcaaccatcctctcagcatcagcaagaccctaaattcaggataaaaacagctgctcttggattataataatgataaataataacatttgccttttactgagcacttactgtgtgccacgctctcctctcaccggctttcctccttcccacagttctccctaatgcctcctgcttcagtccgtcccccagaagacagakcgctctctctgtgcttatagccagagcccacactctctgcccagctggagtggtagcccccaagaaaagagctggaagccagccttgttaaatgtcaccgggaactaaccccccaacaaggagctgctcattaaacacgccaggtgcatatccttaaagctctgaatattaaggattccccaagcatccgtggggataaatgaggtcaagtgcttttgtaatatgatattgattagttctgctctgtgtggacagagcaaggccttggctgtggtctaaacccctgagctttctggaagatgccagcatggttttaagacatttttgcagcacaggagaaaaataaaagcattatcttttttattcccccatgcttagctgactatcaccaggcatctcttgtaaacttgtatccagagtggtgagaaggcttcactttgccttacataagggctgcagggaagtttgagatgggaagtcagcaggctcagcccctgtaactcttgattcctgactattcctgatgaagaatgacacacctccttccctggggtcgtgcttctagggaaattagcctgcttgtcagtggctttggtgctctcagggaagatgtgctataaataccaagatggaggatccagtctggcctcctgtgggttagggtgtagctgctgttaaacagccagcggtggaggtggctgcgggggctgcttgcagacagcagcaccctcggtgaccgcaaagtatgagcatagcccaggccccttctcctgcctgcatcctccacaggacggcccttgagagacagaccttgtgcaaagcctgtccctgccagcaatcctgtttctggaagttattggttgttctgttctgtcgttactgctctctgggctaaaatatcaaagctactttggacaggcttcagttggctctggttcttgcagttcaagaggaacgttgaggggtcctggcgttggcatgaaataaggagccaaagtggacatttcggaagcttttccccacaaccacccgcccccacacccacctactctcccgcacccacctactctcccgcacccacctacyctcccgcacccatgggccctgctccatgcagctcagaagtaaccagcttgccagaagggccactgagagggacagagcaccccctaaaagtcccagttgagcacccaatgcccgctagagaccgaggccaggaaaattacctaggcagatcagtcctccccacagctgcccatgctggtgggagaaccaaagcatcacccgagggacactgaacatagttccggaggaagttacactcaccaccacttccaaccatcgcattctctcctgacatttcaaatgttcctcactgttcagcatgctggctcacaggtaagccaggatttcaatgccaacaaatttgccccctttctgggcctttacagggctctggccctgcaaaagtcacagcatgtgcttctcactcctgcccttcataccctaagtattatgcttgttttccggatacatccaaccatttgattggaatcttgagtccatcacttcccactctctstgtrcgagttccgtcatctgttatcatcagcacgacaccgattcctatgccagagagtggttggcaggatccggggggataatycrtggaaagatgttagcttaacacagggcctggcacctagaatacactcagtggatgttggctttggtaaccagcgttattcacgggaatggtgttaaccatccaggatcgcttactaagctggacagggtgctccgatctgagacttccttcatgagaccgccctccctcctgcaaatgctgtgagcatgatggagytaattgtgattgtattcatccattttgcattgctatcagggaatamctgagtctggtcatttatagagaaaagaggtttatttggctcacagttctgcaggctgtgcragcaakgcaccagcatctacttggcttctggtgaggcttcaaggagctttaactcaaggcaggggagtagacatgtcacatggtgagagaggaagcaagagagagagggaggatgtgccaggctctttaaacaaccagctgtcatgtgaagtaacagagtaggaactcacccattacctcattaccatgaggagggcaccaggccattcgtgggggatccactcccatgacccagttacckcccaccgggacccacctccaacactggggatcacatttcaacataaggttggaggggatgaacatccaaaccatctcagtgatggggctgatggagctcagaaacagaaagggccatcagattgcaaatggctcggagagttgctgtttttgtaagttctctggctgcaccatttcaaggggggaaggtagaaagatggggatggtgccacatccccatactagtctggttggggctgtttgccataagtcacgagctccttggtgaacaaggacagcttcatcatggtttcgtgtggtccatcagcaaattaaacccccaggtttgcccacgtgccgagtcctggctgtgctaacagggctcctggggaaagctgctccatgtcatgcctggtcgtgcttctttgtcatataggctgctgccagtggcgcgggcactgtgatgtgagggggtagggcctttcgggtggcaaggagaagctcagaggagaggctggtgtttgcagcactggacagctgtgtctccaggggagaagtggggagaaggtagaaagctctctcaccatgtcatatagccagagagcctcytggggtaggtctagactgagaggaggtgcccgaagtccccatcactggggcctttacagagatagagtgagagagagagtgagagccacctatgtcagggagtgccccacagggatgggccttttggggactcacgccaccgttacaggctcaggacatgtgctggttcttccacttgcgttcctgcattttgcttttcatgttcrcatccaccccagcttccctttccgtggctcactgtgcccagagattgctaataaaggtgccacttggcaccraggctagtgagaagaatgcaggacagagataccacctctgggatgtgctgggagtgtaagcagrckgccggccaggccaggaagccaggrcccctcctgcctgtctccacccctcacgcccatgtgagcctgcctccctcccagcacagacagcccactgcagactcctgctggaggcccacccacctgtaatcgtatagctctagagacagagagccttccctctgctgaccctggcctgctgtccatcagctgccctcagggaggaaggcatggttttctttaaggcaggaaagcccagctgcaatgtcagtccccttagagtgacttttattacaattgattctcatacaaatgccgcttggcccagaggaaagatctttaataaacccatggaagggggagctgacatcacatcaggctcagtccgagtggggggtggggattcctggtctgctgtatctggtctggcccaggccaaggggcagggagctacccagagcatcaggcagacctagcccctgccccaggtaggagctcatggtctagttatggtggccatgcaggaggatgaacccagggctcagctcaggcacaagaggggctcagaaatggtgggctaccaggatggactagtagttgggaagaactcagaaaggtggggccagggtgggctggtagttgggagaagacttcctgatcctgcagccaaaggagtttctttcattctgagcacctagatgtgccttgctgctgcctcagggctcccagcagttctttccctgtcctgcagtcaacacctggctgagtgccccatccagactgatgcccacagacagcaggcctggttcattctcactgctgtttccccactgtcctatattcattggacttggtactagttcattcattcattcaatcattcatccagcaaatgtccatggagcatttttttatgtgcaggaacttttctagtcactgagggcataatgtgattaagactaatgaggtcctgagaaagtgacagaggaagagacagatattgatcaaatagtcacatagcaagtggaaattagcagccatggctggtactctaaaggagaggcccatgggctatgggagctaaaatagggagatttgacccagtcagggaagggtcaccaagaaagtgacatttgagccataatcaggaagacagttaagagttggccaggtaaagaaagaaggtagagctttccaggaagagggactcacatgtgcaaaggtcctgcggcaagagggatctggggaaatgcaaaggcctcacagaagcttactgtggtgggtgcagagaaagcaagatggggaagcaaaggggaaattaagtcaaggttagagtttactggtcaaacagggtcaaactgtaaggccttttgaagagatcaggaagctttgactttatcctaagagcagtgggatggggtttgagtggctagggcatgatgccttcagaaatggtcactctggttgcaatgtggagattggagaggtgggatgaatttgatagatggggaagaccacttaggaggcagtgatccagtcaagagatgatggggcttggamtcattggatggatgggttgatggatgtctgaatggggtgataaaaacaagtagctggtgggtgagtgaagggaaggatgtgtgaatggatgggggatgaatgggaggaagratgaatagatgggtggatgatggaagaatgaatggatgggkagaaggaagaatgagtggatgagtggatgaattggagaattaatagatgggtggaaggaaggatgaatggatgggataatgaatggatggaataataaatggatgggataataaatggatgggtrgacagaaaatgagtggatgggtagatgggtacatagaagggagaataaatgggtgggtagaaggatgataagttgatgggtagttgggtggatgggtagaaggaaggatgagtgaataggtagatgggtggatggtgggagaattattggatgggtggaaggaaggataaatgaatgggtgaatgagtgggagaatgaatggatgggtagaaggagaatgagtggatgggtagatgggtgggcagatgggagaatgaatgaatggatacaaggatgacgagtggacgggtagatgggtgggtggatgggagaatgaatggatggattcaaggatgatgagtggatgggtagatgggttgatggatgggagaatgaatgggtaggtagaaggatggtgagtagatggtagatgggtgagtggatgggagaacgaatggatgggtagaaggatgatgagtagatggtagatgggtgaatggatgggagaatgaatgggtgggcagaaggattataaatagatgggtagatgggtggatggactggagaatgagtggatgggtagaagaatgataagtagatgggtagatgggtgaatggatgggagaatgaatgcatagatacaaggatgatgagtggatgggtagatgggtggattgatgagagaatgaataggtgggtaagaagaaggatgaattaatgtgtgagtgggtggatggatgggagaacgaatgggtgggtaagaagaagggtgaatcaatgtgtgaatgggtggatggatgggagaatgaatggatggatagaagaatgatgcgtagatgggtagatgggttgatggttgggagaatgaatgggtgagtagaaggaagatgagtggatgggtagataggtagatggatgggagaatgaatgggtgggtggagggatgatgagtggatggatagatgggtgaatggatgggagaatgaatggatggatggatggattgatggatgagtagattgggaatgagtggaaaaataaatagctgacgcataggtggaaagaagatataagtgggtggatgggtgaatggagagtagaaagtaggagaaatgggtaagtaggtaaaacatggatggaaagatgggtagatttgggatacaagttgaggcttgcaggatgggtgggattgggattgcaggcatgcctaaggttggagtttccagcaactgaatactgcacactcatgtcttccaggaaggaggccataggaaaaaagtctccaagtggtggtaggtcccagaattccatgccattccatgcttctgcctgcagtccctaggccactgaacctagacagaggggaagggcagagtgagtggacacagccaatcccagcctgcttccgactcccctaatccctcagcctttagggacaggagcagcggacctcctccctctgctgggcactgggtactctggtggatgcagcctggcccagatttgctgattctygtccacgtacaaattaatgtagatatgttttttcaggcatttaagaaatcccatctccaggtgggcagataaataactctatttacattaaagactaatgtaacaaaaatacaccaggcaataattcataatgcattctattctacagagtcatattttaatgtgtgacatatcccaggcagctcctctgtgctaatttcatttaatgagcacatgttatagaattttcagagcactatccctgggcaattaaaatatgttaaccttttggttaaattgtgtttctaaagaaaagtcctcactgtgaaacagaaagaaatatccaggtgtcactgaggtggaacccaaaggcggattgtaatgggaaaggactgctgttaggtcctgcatgtgctggctggagggacctacagcctcctcccggacctcaggccatgctgcaccatccctgcccttgcatggccaggcccatttccactgtgcaggacaaggagctgaagcctggacccatacagtgagcagccttccttgagcagtcattaattgactacccactatttgcctgacccaggagatccaaggtacaccctggctccaaggttgggaagattgtagcawggaggtgaggtacccccagacaactggggtttaaatagggctagtataggagacttcaaggaggggcaggctcctctctttcaaaatatggacaggtcccccagctctgccatctacataatgggcacaccagtgctccagcattcccaagtcccagagtttcagatctggaaggggctcttagagagcctagtgtgagtgattcccaaactgtgctccttagaaccccaggagccccaccccaacttcaaccagagccattctgcttctaatggttttacatattggggttccatgaagccattagttgaaaatagggttctactgctttaaaagatttaaaagcagtttatatagttctcctgtgtgtatatatatacctatatatatatatatgcacattatattaaatatatatttatgcactttatattaaatatacaaatagttttcatatatatgctgccttctaagggaagaatttgaagtggcttataaaactgaatgtgcggccgggcgcggtggctcacgcctgtaatcccagcattttgggaggccgaggcaggcggatcacgaggtcaggagatcgagaccatcctggctaacacggtgaaaccccgtctctactgaaaatataaaaaattagccgggcttggtggcgggcacctgtaatcccagctacttgggaggctgaggcaggagaatggcgtgaacccgggaggcggagcttgcagtgagcagagatcgcgccactgcactccagcctgggcgaaagagcgagactctgtctcaaaaaaaaaaaaaaaaaaaaaaaaaaaaaactgaatgtgccataatagaatgaaaagtttttaatgagcaaattggaataaaaggaaaatgaaggtgaatttgtgaaatcatcttgagaaaaagttagacaaagacatgtgtactggcagtgttgggaagctggaaggtgaggtcaaggtcactcttgcagccctgggctccccagagggaactcgagacaggcctctcagccccagcttgtatctgaaggttaaaaatgcgaggccacctttgaaggacctggcccatgtctggtgcattatggatggttagaccagctgggatgtctaagaaagactttcattcatgcattcaacaaacattttgtgagcctgtcagggttccggcaccgtgctgggtaatgaggacatatgcagctgagacagccatggtctccactctctcaggcacacccgctagcagagaagacaggggtcagacagtaacacactacggccatccacatacagccccgaagaaatggaacttgccttggagcctgtaggacaaagggagcctccagactgggtcagcgagggcccaatgtctgaaggagacccatggtctgaggaggacggaaatgagtgaatgggaggtctccgggggtcggcagggtggattcatgatggcactgggaggcaggcaggggtgcggggagagaggtagccaggcgagaagagttaggtcttcagcctgagacagagactcctgggaacttggggagcaggaggaaattgtgctttgcatgtgaaaagagtactctgggtcgggcacrgtggctcacacctgcaatcccagcactttgggaggccgaggcggttagatcacctgaggtcaggagtttgagaccagcctggccaacatggtgaaaccccatctctactaaaaatacaaaaattagctgggcgtgctggcacatgcctgtaaccccagctactcaggaggctgaggcaggagaatgacttgaacctgggaggtggaggttgcagtgagccaaaatcatgccattgcacgccagcctgggcgacaagagtgaaactccatctcaaaaaaagagaagaaaagagcactctgtttctgcaaaggacatggtttggttcttttttatggctgcatagtattccatggtatgtatgcatcacattttctttatccagcccaccgttgatgggcatctgggttggttccatgtgtttgctgttgtgagtcatgagtgctatgatgaacatacaggtgcaggtgtctttttggtagaaccaacctgcacatgtaccccctgattctaaaataaaagttgaaaaaagaaagaaaagaaaagaaaagaaaaacggcactctgggcagccacgttagagtgctgggctatcagtgactggcttgcgggggcttggtggatgcagggaggccagtcaggagctgctgcccccgcccaggtgagagctgatgcagtgagggggagggttggagtgccagggcagggtgggtgtggggtaatggcaggggcaggaagtagatagattcagagctgtattggagtcaacttgtgggggcctctgagatgggccagagaagatgggtgagcttgaaagagccagagaggaacaggaarggaatctagcaaagggaacagactgagcaaaggcctgaattcaggagagcctgggtgcatgcagcccccagcgcaagagccccatttacctggagctcaagacactcaaaggagtgtggagacaggcaaggcggcactgtccactgggtgaaagggcttccagctggctaaggaacttggactcattcataggtaccaaggagtcactggagataaccttctaccacctacccactgtgtgaccttagtcaagtcacccaacctctctgggcctcacctatgaamgggaaagtggtttctacctcctaaggctgctgagagrgataaaggggaaaattctcttgcaggggccgagtgcagctgctggcactgagaattgtgtgcctttttacagcccacaggctcaaaggttagcaatccagatggggcaggggcccctcaggtgaggaatgggccccacactgagggaggcagcctcgccgtccccgctggggagcccccmcccccaccccggtgctcactgcagtcgggccgcctgcggccccctctgacagcagctgcctgaccacagagtaaaggcctgtttgccattcacattaagtgacatcattaaagggccattgggggcaagatgttatctcaaaagagatggaaaactggagaggaggtggcggcaaagttggccacattaaaaagccaccatgaatgttaacattcagggaaaaatctcatcccccattctccttcccttgcaagtagccaggggccagggtcaggctgaggcattcatggggaaggagagttccagctctttgggcccgagaggtggtgtgtgtggcagtggttaggtgtacacaggggccagactgcctgggtgcaagtcccagccctgctgtttatctcagtgtggccttggttgggctgccagatttagcaaataamaatataggaccccccgttaaatttgaatttcagataaaccaccagtaacatcttatgaatgtaagtatgttccatgcaatatttgggacatacttgtactaaaaagtatccattgtttttctgcaattcagattcaatggagtgtcctgttttttatctggcaaccccaggcctggggcaaatcacttcatctccctggacctcagtttccccaactataaaataggagtaaaagtaactcctgccattacaaggattgaatttaacgtaggtcacatacttgctgcagtacctggccctaataagtgctggcaacctttgccttgttatcctaaaggtgctgggttctgtctgcttgactggtctggtccctgacatctgctcttgactagaggtcatcagttgcaacaccaggcaattgccatgtcctggttttgggtggggctgcttgctgggggctgaggagagagggaggccctaggccagccctctgacgcatgggcttcctccacgaccagagaggtaggacatgtgaggaaggcacttagggggtagcagaagagaagaaggcagaggcaaggggcacctaaacaaacagcacagacatttgtgccaagccctctgtgtttgggtgctcagggagggctgcctggaggaggcagcatctagacaaaggaaaagtagggggctagtcgttctgcggggtcagcctggatatgcctgtagggaaccagagcacatggctgcagcaggggaatggtcagattgaagtggggggatggggaattacggacaaaccccaactgcggcactcaggcagtggctctttctcctgtgggcagagggcagtcatcaaaggttctgyttctcagggagagtgtccaggtgcgtctgaaggatggagtggttatgaaggcaggagaatgctgtaggggccactgctgtcattgggcatagtggaggcctgaactggggctgcagcaggggagagagggcacagcagggaatggctaaaacaggcggggaacaggcagtccagccacatttgcccaggagtactcaggctccttccacgtcctggacacggaggcagccatctgggcatcatcaccaagggatatgacgtcacccccaggaggacagcttgtctgcaaacccaggagctgactacccagggcctggaagcgagggacagggcaggaggacctgtgcatgtctcgtctgctctcaaaggtccgcaccccacactggacttttctttaaaatatctcgatttcctttaaagcccaactgcatcagtggccccttgcttctgccccagttacagtacacattaattttatggcagaaactaattctacccgaactccgttagtgttcaattattcctcgctgactgcctttgaataaatatccatgaagaggcttttaataaaacatcaacaagggaggcagcctccttgcaaggtggcagaggttctcaccctgcagcgggctgggccagtgctgcgtccaggggagagctgggagccaggttctcagcagggcctgggagatcccgccagatgytcccagggtggggcaggctcaggagccccatcaggaagccgggaatgtgggagctaggagagccagccccctacatgaaggaaggggtgtgtctggccacacaactgcatggggacaaagataggatgcataccaggcctcctgggtcctgcgccaggcctggcacatagagtgcaaattcaggcacccacaaagggccaggttggctgagcaaaaggggcccaactgcgcaggaggctggggcaggactggcagctcaccctgggcccaggctggtggctagcagggagggatgaggggaaggatttctgctgggaagagcagccggcccccacccaccccagtgttctgtagcttggtggaaaagcagtcctggggttgctgattctggggcctttctaggaaatacctgaatctctgcttttatgtagaagtctcccaatttttacatgccagattataatttacaatttgtaagactctgtgtgcaccaaactagacccttctgcaaatcagacagccctcaggtggccacttggtgcctttaccttgtccctgggctctgtagaagacagcattttgtaaccaggaaatcagggagtggggcaggcagggaaataagaagactgaaaggccaggctctgggggagtcccaacgctgcccccaatgctgcacccatgctgccccaggrgagctctagcactggccgcagtgctgccccaggagagcctgatacttcccccagtgctgcctcaacattgccccaggagagccccaacgctgcccccagtgctgccccaggaggtccctgacgctggctccagtactgccccaggaggcccctgacgctggctccagtgctgccccaggagaaccctgatgctggccccaaggctgctctaggagaccccagacactggccccaatgctgccccaggagacccctgatgctggccccaatgctaccccagtagacccctgacgctggcctcagtgctggccctgacacgggccttggcatctggaccatatatgtctccccacagggaaaaggatggggtttgactgtagccaggatggctactagatgccctctcctactctcactccacaagcccctgcaaacccagagaaattccttgtacactggccccaggaagctcggagacggaggctcctccttcagctggggcatggccttctgctgcactcctgagcgggccccagggcaggtgatggggaattgggaagagcaggtctgctcccagctgccccaggcagacagccatccccatggctaaatggatgttcaagtccagcccattaaggccatgattgccccttgggggctgccttcttgtttcattcttagatgacagcaaaagagactagaaataggcttgaacatcagagctgaggggcccctatccaggaccctcagcttggctctctaacctttctagccamgaagcccttgttctgactaaagatctgttataagccaggagtggtggttctgacctataatcccaacactttgggaggccaaggcgggaggatcacttgaggccaggatttgaagagyagcctgggcaacatagcaagattccattattaccaaaaaattttaaaattatctgggcatggtggcatgtgcctgtagtcccagctactcaggaggctgargcaggagaatcacttgagcctgggagttggctgcagtgagctatgattgcaccactgtactccagcctgggtgacagaatgagaccctgtcaatcaatcagtcaatcaatcaatgtgctatgacagcacaaaatgcagaacagacatgagtggccttgatctgcttgacacagaggagggacctgtctgtgagacctccatggttgtcctcatggtagaatatccaagcttgctgttggaatggctttgtctgaagacgacaatgtcttcccttgaactagctcttctctagtggctgcctgtactcrgtgtgtgaatattctatgcaatactggacaaagcaagtgaaagacagaagcactacagcgtcagcctatgaaatgagcctccacttagccaggctgcaagagccagaccagcctgttgtccatttttgtgtgtagagccagacctcaaatgtgtcttcattttacttactcttctcaaacctgaaaaaaaaaaaaagcagcactgtttgcaaacccctgaccccagatgcagctcccaggccaccagcaggtttgcaggggcaagggacctrgccaggcccaaaggatctcagccccagyggagagggctgcagctctcttctaagccacggccagaaaacaagggccacagactacagctggggcccatattaccccaaaggcagagggaagccatccatacttctagaaacatgggcagcagtggctgccctggcgagctgtgcaggctggtaagctgggagccccctactgtgatcccaatgcccacagggtaggagtggcccctctgcactccgttccacagcatagaaacagatactccatgccgatggaagtcccagcccatatgggtattcccaacccttctccccactctccaggaagctaactcacaggcttgggcagagcttgggtcagacgatggcctggaggaactttcacctttacttttagcacaaggcatgaaatggcttgagagctgccatattgctttctggcagggatttggaattctgcttttgcttgataaattgaaatgaggaatttcccagacaagctgctgggctggcacctttagtgtgcttatggtggggtggggggcagggggaagtagagatgcccgttgtgttctttgagggtctctttcaaatggctccagcgtgtctcttatcctgctcactatctgaatgataaaaattaatatcttaattgatatcttaatcttgagccaaagaagctttgattcctttaagaagagtgattagcaaaatgatgatacttgcttaatataaggaatgaatcagctactgttccatcagagggcttccctcacctctcaagcagcctgattttgcaccttaatcatgacaaataaacttgctcatgctccagcgctattcctggtactccttaggacaggagggaatagataaagaaaccattagcatccagtcaatgcatcagcctgcatgccagccagcccgctcagcacacaacccccaggaacacagatgtctccacgccatgtaaaaaaagaggctacagggatgggaatgagatcctacctcagtgagcagaacgtaccctctgggccttgccttgtagggtcaatttgggcctgggacctgtcattctggamagcaatggacagcagaggccaagtgctggacattggaacagacagtgtgatcctgggcaacatccttcacttctgtggatcttgtgtcacatttggaaaaggaggcaatgcctggggagcaggtggacacagggctgcaagactcctgagctctgaaccattgctgatgtacagaccccacttactcagggtcagcctggaagccagacttccttggtctgcccygattcatttgggaaacctagattgtttatatgtctgatgaatcaggtagtaaaaggttgcaaatcctaggtccttcttttgccaaagatccagggatgtctcaaaataagtggttgaggaatcctgcataggcaactggggtawccaggttctctcactggtactgacktcrttggcaagacccatggagagcaaggaaaagcagggtggtgcggtggcccacctgggagccgcatggggcaagggaagcacctaccaccagccaagggagtcagtgagtgatcatgctaccttacccaggaaaccatgctatttccacagatctgtgaaaccygtgggtcaggggatctccctcatgagcccgtgccaccagggccttgggtcccaagcacgccactcagctagagactgcctaagactactgagttccggggagaggggcagctgtcatcactgaggctgcctgctgcctaagatggctaagctcccagggggaagggcagcagccatcactgcagttccagtctgctgcttttcccctgccagtactggggagactaggtggtttggacccaggaggaattccccacagtgcagcacagcagctgtggcagatcaaggtcagactgcccctttaggcctgacactgacccatccctcctcacctggtggggcctccctgcaggaatttcagcaactacagccaggcgtatagggacagagctctgatctccctgggactgagcycctcrggggaggggtgtctgcggtcttcacagatcagcagacttagtcttttcccctgctggctctgaggaatctgggcagtctggacaagtgagatcccccccagcatagcacaccccctctgccaaggggtagcaaaagtgtttcattaagcagatcccatgcctgctgaccaagaccccccacaacaggggtcaccatacaggagtgttcatgctggcatcaggttggtgcccttccaggatggagatcccagaggaaggagcaggcagccatctttgctgttmtgtagcctccactgatgacacctccaggtatgggagaaaccccrgtgaatagggtctggagtggacccccagcaaaccacagaagccctacagaagyggggcctgactgttaaaacaaaarcaaacaaacagaaagcaacaacaacagcatcaaccaaaaaagtccctgcaagaaaaccccatccaaaggccagcagcctcaaagattgaagctacataaactcacaaagatgagaatcaatgaaaraacactgaaaactcagaacgccagagtgcctcttctcctccaaatgattgcaacatctctccaacaagagcacagaatggggcagaggctgagatggatgaattgacagaagtaggcttcagaaggtggataataacaaactttgctgcactaagagacatgagaaaacattacaggagctgttaaccagaataaccagtttagagaggaaccgaaatgacctgatggagctgagaaacacaacataagaacttgacaatacaatcacaaatatcaatagccgaattgaccaagygggggaaagaatttcagagcttgaagactatctcactgaaataagaccagcagacmagattagagaaaaaagaatgaaaaggaatgaacaaaacctccaagaactatgggattatgtagaaagaccaaacctacaactgattgaagtgcctgaaagaggtggggagaacagaaccaagttggaaaacacacttcacaatatcatccaggagaacttccccaacctagcaagacaggccaacattcaaattcaggaaacccagagaaccccagaaagatactccatgagaagatcaaccccaagacacataatcatcagattctccaaggttgaaatgaagaaaaaaatgtaaagggcaaccagagagataggccagatcacctacagagggaagcccattatactaatggtggacctcttagcagaaaccctacaagccagaagaaactgggggccaatattcaacattcttaaaagaatttccaacacagaatatcatatccagccaaactaaactttataagcgaagaagaaataaaatcttttcagacaagcaaatgctaagggamtttrtcaccactaggcctgccttgcaagagctcctgaaggaagcactaaatatggaaaggaaaaacttttgccagccactgcaaaaacacactgaagtacaaagaccaatgacactatgaagcaactatgtcaacaagtctgcaaaataaccaaccagcatcatgatgacaggatcaaatgcacacataacaatattaaccttaaatgtaaaagctctaaatgccccaattaaaagacatagamtggcargctgataaagagtcaggacccattggtgtgctgtattcaagagacccacttacatgygaagacacacataagctcaaaataaagggatagaggaaaatttaccaagcaaatggaaagcagaaaaaagcaggggttgcaattctagtttctgacaaaacagactttaagccaacaaagatcaaaaagacaaagggcattacataatgataaaaaggatccattcaacaagaagagctaactatcctaaatatacatgcacccaatacaggagtacccagattcataaaacaagttcttagagacctacaaagagacttagactcycacacaataatagtgggagactttaacaccccattgtcaatattagatcattgagacagaaaattaacaaggatatttaggacttgaactcagctctggattaagtggacctgatacatagctasagaagtctccaccctaaaacaacggaatatgcattcttcttggtgacacatggcacttactctaaaatcgatcacaaaattggaagtaaaacactcctcagcaaatgcaaaagaactgagatcataacattctctcagaccacagtgcaatcaaattagaactcaaaattaagaaactcactcaaaaccacacgaccatatgaaaatggaacaactagctcctgaatgactcctgagtagataatgaaattaagrcagaaatcaagaagttatttgaaatcagtgagaacagggacaatgtaccaaaatttctgggacacaactgaagcagtgttaagagggaaaattatagcactaaatgcccacatcaaaaagctagaaagatctcaaattgacaccctagcatcacaactaaaagaactagagaaccaagagaaaacaaactccaaagctagtaaaagaaaagaaatagttaaccaagatcagagtggaactaaaggaaacagagacatgaaaaatccttcaaaaaattaatgaatccaggagctagttttttgaaaaaattaataaaatagttagactgccagctagactaataaagatgaagagaaagaagaatgaaatagaaaataaaaaatgataaaggaratatcactactgaccccacagaaatacaaacaaccatcagagaatactataaactcctctatgcaaataaactaaaaactctataagaaacgaaaaaatttctggatacatataacctcccaagactgaaccaggaagaagttgaatccctgaatagaccagtaataagttttgaaattgaggcagtaataaatagcctaccaaccaacaaaagcctgggaccagatggatttacagctgaattctacyagaggtacaaagaggagctgttaccatttcttcttaaaytattccaaacaattgaaaaggagggacttctccctaactcattttgtgaggccagcatcatcctgataccaaaatctggcagagatacaaaaaaaaraaaagaaagaaaactttaagccaatatcccygatgaacatcgatgcaaaaatactcaataaaatactggcacaccaaatctagaggcacatcaaaaagcttattcaccacaatcaagtcagcttcagycctgggatgcacaaaacataattctaaacagaacgaaagaccaaaaccacatgattatctcaatagacatagaaaaggccttcgataaaattcaacatcccttcatgtcaaaaactctcaattaactaggtattgatggaacatacctcaaaataatgaaagccgtttatgacaaacctacagccaatatctacagaatgggcaaaagctgaaagtgttccccttgaaaaccagcacaggaaaaggatgccctctctcaccactcctattcaccatagtgttggaggttcyggccaggacaatcaggcaagagaaagaaataaaggatattcaaataggaagagaggaagttgaactgtttgcagatgacatgatcctatatctagaaaaccccattgtctcagccaaaaarcaacttaagctgataagcaacttcagcactctcaggatacaaaatcattgtgcaaaaatcacgagtattcctgtgatagacaagcaacaatagacaaaaagagagccaaatcacaaatgaactcccattcacaattgtttcaaagggaatcaaatacctaggaatacagctgacaagagaagtgaaggatctcttcaaagagaactacaaatcactgctcaaggaaatcagagaggacacaaacaaatggaaaaacattccatgctcatggataggaagaatcaatgttgtgaaaatggccatactacccaaagcaatttatagattcaatkccattcccattaaactaccattgacatgcttcacagaatcataaaaaaaacttttaaaattcatatggagcccaaaaagagtccatatagccaagacaatcctaagcaaaaagaacaaagctggaggcatcatgctacctgacttcaaactatactacagggctacagtaaccaaacagcatggtacaaaaactgatacaaaaacagccacatagaccaatggaacagaatagagaactcagaaataaataagacgcacatctgcaaccatctgatctttgacaaacctgacaaaaacaagcaatggggaaaggattccctatttaataaatggtgctgggaaaactggctagccatatgcagaaaattgaaactggacctcttccttacaccttatacaataattaactcaagatagattaaagacttaaatgtaagctgggcacggtggcttatgcctgtaatccagcactttgggagaccaaggtgggtggatcacctgaggtcaggagttcaagaccagcccgaccaacatggtgaaaccccatctctactgaaaatacaaaaaattagctgagcgtggtggtggatgcctgtaatcccagctactcagggcgctgaggcaggagaattgcttgaacccgggaggtggaggttgcagtgagctgagatggtgccattgcactccagcctgggcaacaagagcaaaactccatctcaaaaaaaaaaaaaagacttaaatgtaaaacccaaaactataaaaaccccagaagaaaatccaggcaataccatttgggacataggcacaggcaaagatttcatgacgaaagtgtcaaaagcaattgcaacaaaagcaaaaattgacaaatgggatctaattaaactaaagagcttctgtgcagcaaaagaaactatcatcagagtgaacagacaacctatagaatgggagaaaattttgcaatctatccatctgacaaaggtctgatatccagaaactacaaggaacttaarcaaatttacaagaaaaaaacaacctcatgaaagactgggcaaaggacatgaacagacacttctcaaaagaaaacatttatgcagccaacaaacatgtatatatatgtatatatatataaagctcaacatcactgatcattagagaatgcaaatcaaaacctcaatgagataccatctcacgccagtcagaatggtgattattaaaaagtcaagaaacaatagatgctggaaaggctgtggggaaatagaagtgtttttacagtgttggtgggaatataaattagttcaaccattttgggaaacagtgtggtgattcctcaaagacctagaacaagaaatatcatttgacccagcaatcccattactgggtatttacccaaaggaatataaatcattctattataaagatacatgcacacacgtgttcactgcagcactattcacaatagcaaagacatggaatcaacccaaacgcccatcaaccatagactggataaagmaaatrtggtgtgtatacaccatagaatactatgcacccataaaaaggaatgagatcatgtcctttacasggacatggatggagctggaagccattatcctcaggaaactaatgcaagaacagaaaaccaaacaccacatgttattattaataagtagcagctgaacaatgagaacacatgaacacagggagaggaatgacacacactgggacctgtcagtggggaggttaggagggagagcatcaggataaatagctaatgcatatggggcttaatacctaggtgatgagttgataggtgcagcaaaccaccatggcacatgtttacctatgtaacaaacctgcacatcatgcacaagtgtcccaatacttgaaataaaaawttttttaaaaagaaacataaaaataaaaccacaatgagataccatctcatgccagttagaatggcaatcattaaaaagtcaggaaacaacagatgctggagaggatgtggagaaataggaacacttttacactgttggtgggagtgtaaattagctcaaccattgtggaagacaatgtggctattcctcaaggatctagaaccagaaataccatttgacccaacaatctcattactgggtatatacccaaaggattataaatcattctactataaagacacatgcacacatatgtttattgcagcactgttcacaatagcaaagacttggaaccaacccaaatccccatcaatgataggctggataaagaaaatgtggcacatatacaccatggaatactatgcaggcataaaaaagatgagttcatgtcctttgcagggacatgaatgaagctggaaatcaccattctcagyaaactaacacaggaacagaaaaccaaacaccacatgttstcattcataagtgggagttgaacaatgagaacacatggacacgggaggggaacrtcacacactggggcctattgggggttgaaaggctaggggagggatagcattaggagaaatacctaatgtaggtgactggttgatgggtgtagcaaactaccatggtacgtgtatacctatgtaacaaagctgcayattctgcacatgtatcccagaaccttaagtataataatattttaaataaataagtaggtggttgaagagatagtttgccttgctkgttctagcttggaaaattttcctcttgagagaaggaaatccgcaacctgagaaagattattctccagcccttttaaagaagaagctatgtcacccttttctrtaacatctatttgcatggcacttgactctgtttgaggcgctgttgtttacatgtttgtattgttagcttttgatacataatgaaggaccccaaaactcaatggctttggcagaacaccacagccgtttttagctcaggattctgtggctcagcaatttgggctgggctcagttgggcgattcttctgctggtctgttgggctcattcatgtgtctatgatcggctgctaattcaattgaggccatgttggtctagagggatgtccactaggacatctcatggctcttatcctgcagcaggctggcccaggcttgttcatgtgacagtgggttctaggaggcacaagagagagggcaaacctcaatgcacaaacacttttcaggcctttgctcacttcacacccgataatgttccgccagcaaaagcaagtcatgtgaccaagcccagagtcagtgtgggagggcactatgatagggatgctgggatggggaagggggacttgtagccatttttgcaatcaaccactataatattgcttaatctggacccctgcccagtgagacatgccatgcacatattaattttatggagccatgcacatcccattttatgaggtaaagaatgttgccccgsgtcacatagcaagctggaaacaggactaggcttggaagcccatctctccagtgccagcccactgcaccatcccacttctcttggttccctcccaccccaacatcagtgccaggccagggagagaatgaagtgtcatccaggagccaaaccctggccacctgtacagacatccagcaacagagacatagcagaccctgggtgaaccctccccagacatcagcctccaggagccaatgctgcagccccactgccactrtagcccccaccctggcccagcacagagtggcaggctggttatttcaatcaacggtgttttgaaaatcttgcaatttaaaaccttttaaacatgagtaggtgaggctgtgatagtgccaatgactagttgggagtacttagaggcaattttaaatgtctcctgaaatctccatgccaacggtcccatggggcaccagacaaggttcacgttgccaggctcaccctcctgttagccatttcccctgccgctgcataccctgagggcttggagttccatgcacaagtgcatccacctttaaacacctcatgcagattayttctgtctcacctgcacctgccttcatgtcaggatttgcagaagcctaaagatcagagccaggggccaggcacaatggctcatacctgtaatcccagcactttgggaggtcgaagtgggcagatcacttgaggtcagaagtttgagaccagcctgggcaacatgatgaaattccatctctgctaaaaatacaaaaattagccaagcatggtggcmagcacctgtaatcccagctgcttgagaggctgaggcaggagaatcacttgaacctgggaggcagaggttgcagtgagctgaggtcacaccactgcgctccaacctgggtgacagagtgagactccatctcaaaaaaataaaaataaaaaaaatttaaaaaggccaggcgtggtgactcacacctgtaatcccagcactttgggaggccgaggcaggtggatcacctgaggtcaggagttcgagacaagcctggccaacatggtgaaaccccgtgtctactaaaaayacaaaaaattagctgggcttggtgtggggtgcctgtaatcccagctacttgggaggctgaggcaggagaattgcttgaacccaggagatggagtttgcagtgagctgagattgcaccattgcactccagcccgggcaacaagagcgcaactccatctcgattaattaattaaattaatcagagccaggagatctgtgaggcccatgggaccagtctggctgtgggtgaagtacccaggaggcagtaccctgctctcctggctggatccccactttccacacacccgagmctcagggaactccacccaggcacgtgggcatccatcagctcgtccatcacatccgcctgtcgtccttcccagtaatgcctgacagcaaagaatgagagcagattggagtctttgcagtgacaaacgcaggacgattcttcccacaaaaggggcccagaggcagagcaccagcctgagctgtgctgcaggagggccaggagggatgactgcctgaagcataaagatctggagaggaaggtctgcacacctggagttttgctgtcctaacgcttctcagccggggcccagaactgtgtgcagaagcgatggtctatggacaattcacctgcccctcggatagcaccacccactttgcattcggatgtttgaacacagcctgtgtttcccacagtggtcaggtggaatcctggactttcaggccagatgatttgtacaacctcctccttctacaaaaagaggatgatgggggccaggacatgaactccatgacacagacagctatggccagagcagggagaattaaggagcaggagacgccttggataggaaggactaagtgtgctgctacctggagagaggagagctgtgcattcaggcccagccttgtcagggaagcctcaagtctctgtttattaaggctggagggaaccagccatcctggctgcagtggtggagtgaaagcagccgagccctctgcactactgaaaattgacacagggtagggtctcccacacccctcctcacaggcacggggctgcagcccagctggtggggtcaagagaagggaggagagaggcctccggatggtgcagatgagcagggcggggctgaaaactgcatccattcatgccgctgactctaagcaagtagtgacgtcccccgggggttttggcagcaccaaggatcgtrcagggtgcttccacacttgctcctctcataaccctggagggagcatcccactttccaggtgagaagcccagggtttatgggtgggctttccccagttgcacgggaggccttaaaacaggtgaagaccctaaggaccgacggggagccaggcgggggrccaaggcgaagcagggtgaggcagaggtgttacagcatccatggcaggccaggggccaggttatgatcmcaytggagagacaggtgggagtgacccagaagttgctggggtcatttctcaaagaccccagcccactcatctccaccaacctgcaatttctcagctccacactgcaacccaaagagtggacagacaaggttgctgtggaaaaaagacttacacacagcaacatcaggatgccccagacagggtgcgtgggagtgtgaagctgtgcagtttaggcaggggcatggaggggatgccgggatgcacaagggacagaattgtgtgggatcgtstagccttcatggaggaagaggacaagcagggccagaaatgatgaggacatttctgtcctcatgtatctggggagaaggaagcatattgtctttttttttttttyyttttttgagacagagtctcactctgtctcccaggctggagtgcagtggtgcaatcacagctctctgcagcctccaactcttggtctcaagcgatccagccttctgagcagctgggaatacaggtgcatgccaccacacacagctaattttttattttttgttgtgatggggtctcactatgttgcccaggctggtctcaagctcctgggctcaagtgatcctccagcctcagcctcccaaagtgttgggattacaggcataatcaaccacacccagctcatatcatctttttattaaaataaggtaatgacttggacattagagctgtcactccccacttcaggccaggcgcttgtgtctgatctcactaggatcctaaagtgtatggtctgtaaattacaaactgcagcaacaaaatgcttaatcattaaaccaaggcagccactatgcaccagcctccagctgggtgctaagcgtragtggccccagcctggggaagcctcactgttcctggtctgctgtgagctcctaggttcttgagactcaggtgttaaccttgcctgttttctcatcysctgcaggcaccggccgtagctacaccacagacccactcttgtccctgctcctgttagctctgcataagttcctgcgcctgctcttgggacattgacagacaagaccaacccgagcatctcagaggcygcacatgacctgcccggggccctcggtgaggaccatgtcgctggatggacacagagagactgagagacgcatgaaaaagtccacatggaaaataaataaatcatatttttgggaaagttacacaaatgtagaacacctaaaataatgcatctagtttccaaataatttggagtttggcccatgcagtctgcatgggaatcaatgatttctctacttcaatgtagttttcttttctacactttccctccaagtcttcattttgcacgaactgttgagcagttatctttaggataatatgtacaaatgttggggtcaaagccttttgacaaagcaaaatatttttagtagattattgtgtttaggatttttttttaatttactttttttctttgggggcttttcttttttattaaattatttcttttgaggcattttgattaaaaaagacacatcttatcataattaaaattcactgtcaataatatttatttttaaataaagattggaaacaaggtcagacacttgtttataaactgtattgtatattgctgaagaacagttgaataaaaaacaactttgaaataacctttctacagccatggatgaatgtcaagcgttggtgcccactgcagcctggctgcctgccgttccctcctgtgctctgacaccagctgcacttttggctgggtgtcacccggcgtggaggacagcccagggcacctggctaagaccacgctgagcagatgggagcacctgacaagcctcccctagggacagggcacttcatggaggcggcagtgagacgatcccccagcctgggtcctgaaggaaaggagatcgctaggaggaggtgtgaaataagtcaagaaccactcctcccccacttcgtttcaatgaatcatgcaattcattcgcccacttggagattgtaagtcaaggtgtatttactgtggttagctttgctgctagtttgaagggggaatttggagagaaagtagggcttgccacactccttcccgtgcatctgaagattgctttgagcctctgaaactcatagatttggggcaggttacacatgccctaaggaaacgggcatgccctgggtgggggctactatttatacttcattctaagacagcatctcattagatagctggagcccatggatttgtttaaaacccagccagattttaacacctgcagtttcaataagtgtggttgtcattgatgttgttcaccaaatacttccgttctccgctggccaggcccagggcaggataacgcttcctggcctcctgtggcgggtggggccacagctctggcgcatgagctgggaatagaagggatccgcattgcttctagtccaagacacaggattgctagtgcgacgccctccaaagcacttgtcctctaacgtgacgactcgcagcgttcacatcagcaagtgttcttccagcctagrtcgctgagtgactgcgatgaacacagcctttcctgtggccagygctggatcctgcggccccatgagaagtctgccattgccgcttcacccactcatcttcgggcattatcgcagcataagccagcctgtcctgattggctcagtgtgtagttgattgactgtatttagctcaggggaggagtaattgtgcatttggacagtcccacgtgtacagagacccccaggatggagctgatgtcaggggaggcctgtgtggagagaacgtcgggacggctgtttctgatgggtacattaacttgtttcacatttcctttatattgatcagcaccaattgagctgtaagtttaatcactctgtctggtggatagtgattctgtccagaaggatcatctctttttatagttaactcaatactgcagcagctaatgtcatgtgaaatactggcccagtgtgctggagagcaaaccgtacttcccagataccagtggaacggggacaatgtgtcagtaagggtgacgttgtaccagatcgttccaggggatggagggctggggagtcattccccatcaccaaaaccagatgcctctgtacaaacacaggtagtcagtcaggtcccagcctggaagctcccaacctttagcgtgatatgcacaggggaggggcaagtgtgatgggcacagtggagggggcaggtgtgatgggcacaggggagggggcaggtgtgatgggcacaggggaggggcaggtgtgatgggtacaggggaggggcaggtttgatgggcacaggggagggggcaggtgtgatgggcacaggggagggggcaggtgtgatgggcacaggggagggggcaggtgtgatgggtacaggggaggggacaggtgtgatgggtacaggggaggggcaggtttgataggcacagtggagggggcaagtgtgatgggcacaggggagggggcaggtgtgatgggcacaggggaggggctgatgtgataggcacagtggagaagctggtgtgatgggcacgggaggggctggtgtgatgggcacaggggagtgggcaagtgtgatgggcacaggggaggggctggtgtgaggagcataaaggaggggcaggtgtgataggcataggggaggggctggtgtaatgggcacaggggaggaactgctgtgataggcacaggggaatgggcaggtgagataggtagaggggagrggcaggtgtgatgcctacagcrgaggggacaggtgtgatgggcactgaggaggggctggtgtaatgggcacagggaagggactgctatgatgggcacaggagaggggcaggtgtgataggcacggggaggagccggtgtgatgggcacaggggagggaaggggctggtgtgataggcacaggggagaagctggtgtgatgggcacaggggaggggctggtgtgatgagcacagaggagaagtggtgtgatgggyacaagggaggggctggtgtgatgggcacaggggaggtgctggtgtgatggacacagagaggggctggtgtgatgggtacaggggagggggcaggtgtaatggctacaggggaagggcaggtgtaatcggcacagaagagaagctggtgtgatgggcacagaggaggggctggtgtgatgggcacaggggagggactgctgtgatgggcacaggggagggtcaggtgtgatgggcataggggaggggctggtgtgacaggcacagggaagggggtcaggtgtgatggcatggggaaggggacaggtgtgataggtacaggggaggggctggtgtaatgggcacaggggaggaactgctgtgataggcacaggggagtgggcaggtgagatgggtacaggggaggggcaggtgtgatggctacagtggaggggacaggtgtgatgggcacaggggaggggctggtgtgatggacacagggtaggggctggtgtgatgggtacaggggagggggcaggtgtaatggctacaggggaggggcaggtgtaatgggcacagaggagaagctggtgtgatgggcacaggggaggtgctggtgtgatgggcacaggggaagggcagatgtgatgggcacaggagaggggcaggtgtgatgggcataggggaagggctggtgtgatgggcacaggggagggacttctgtgataggcacaggggagaagctggtgtgatgggcacaggggaggggctggtgtgatgggcacatgggagggactgctatgataggcacaggggagaagctggtgtgatgggcacaggggaggggctgatgtcatggtcacagaggaaggagcagttgtgatgggcacaggggcgtggccttgtgtgatgggcacaggggaggggctggtgtgatgggccctggtgagaggaacaggtgtgctttggagaaaccagctttttctgcacaaagaggattcccctcaaacacagaaaattattcctaatatctgcctcctggggacagagaacttccaggtgggaagccgagcatgaggctaagcaygttccctgaaggggaggctgaacccggcctccagcagaagttaatggaactgagactggggctgtcgtggggctggaagccaaggcaaatctctggacccaggcttccatggagtggctaccagcattcccactggtccagggccccggacacaaagaaaggagaagttaagtgcacccctaagtatccgcagtgccgatccatggggtctgggctcctgttttctggggtctcacgcactccgagaatgaggacaaagaacacttagcctgcactgtgttttatggaatgcatacaaaccagaagagagaagcgccctccagaaacaaaaaccgtggcgtggtgctcactcccaaaactgcctttccctttggagtttgctttcagcctcggcagacatgggctggggttggagagcaagacaatttatttcagtttgggaagaatgcactgtgggcggcctcgggagctcgggtgcaggctgacaggacccccgcctgcttgaagggactgtggagctgtgggtctgtgtagcaactaaatccaaagtgagggacaggagtccagagggagtgcaaactccaccccagcccagagctgagtgacagcagggaagagaaggagggcagccagggtaggggcacgtggagaccgagccaagcccagacccctgtggaggagccctgctctgcctggtgatgaggattgtccctgattctagcccctcatgtggtgctgacccacctgcgccctccaggcagcggccaacatttaggggcatagcctggaaggaaggacaggaattcccagaatttgacaggaggtggtatgagcagagctgcagcattctgagtttcagttctgtttcaaccccacactcctggttacagctctggctcagaaaacaacagctctgtcggatccaagcctgccgttggttggaatacagcaaacagccatttgtgagctgctgagctcctggctaaagggacttctgcccctgccagccaggggaacagtttttttgttttgtttttttttttttttgagatggagtctcactctgtcgcccaggttggagtacagtggcgtgatctcggctcactgcaacctctgcctctgggttcaagcaattctcttgccttggcctcccaaataactgggactacaggcacccgccaacacacccggctaaatttttttgtatttttagtagagacagtgtttcaccatgttggccaggctggtctcaaactcctgacctcacgtaatctacccacctcggcctcccagagttgggattacaggtgtgaggcactgcacccggcgagttcttgcctatttttgcactgcttcttccagtgggcccatccccactttgggtgacactgggcattcattttgcctgcatttcagaggatgcaactcctgcttttcctgggggacaggtggccagaggctttgatgcatttgcccctatatgcatgcacacacctgtatgtagcagcctgctgctttagaacaccatttctttccttctcactaaggctgcagcagcaggagtggtgcagcactggtgaaacctcagccaactgggcgcccrgtctccccagaatggagctgctgcccctcagggctccctgccttcatcagccaagaagagcctgcacaccctaccacagcataaatacaccttttacctcatgccaggggccctagaaacacatggaaaacccacgacctttatgagggacctgccccactttgtggctgcagacacaacatgaggtagagtctggaaacaccaccaggggtgaccccttttaaatgacaaagacccaaggagcaccaaaaatatatttcaagtcacagaaaacatgacttcacaccaagcctaacttgccaccaactagcaaagacccaacaaagatcacatgtgttccctgtacctgattgyttaaaagggagaaatggtaagtggactcttagtagaaagcatatatggtctcgtttagattttgaagttagaaaagattttttaaatgagactgaaaaagcggtaattataaaagaaaatatggaccgggcatggtgactcatgcctgtaatcctagcactttgggaggccgaggtgggtggatcatgaggtcaggagttcaagaccagcctggccaacatggtaaaatcccatctctactgaaaatacaaaaattagcccagtgtggtggtgcgcacctgtagtcccagctactccaraggctgaggcaggagaattgcttgaacctgggagccagaggttgcagtgagctgatactgtgccactgcactccagcctgggtgacagagcaagactctgtctcaaaaaaaaaaaagaaagaaagaaagaaagaaaatatagmcaattttgactacattataacaaagagcactcgtttaccaaaaaccatcacaaagaaagtgaaaagagacttacaaaatacacccaagaaaggattactatcaaacatgtacaaagaattcctagaaatcaataagaaaagcaaaaacaggctgggcatg

SEQ ID NO: 1586 - DNA, 47955 bp, Homo sapiens
  misc_feature (1)...(47955): n = A,T,C or G, or insertion/deletion polymorphism (see Tables 1-2)
agtgagaacatgcagtatttgattttctcttcctacattaatcaccttaggataatgacctccagctggattcatgttgctgcaaaggacgtcacctcattcttttttatggctgtgtagtattccattgtgtatatgtaccaaattttctttatctagtccatcatttatgggtatttaggctgaktccatgtttttgctactgtaaatagtgctgcaatgaacatacatgtgtatgtgtctttatggtagaaagtaaaggattaggccgggcgcggtggctcacgcctgtaatcccagcactttgggaggccaaggcgggcggatcacgaggtcaggagatcgagaccatcctggctaacacgatgaaaccccgtctctaccaaaaaatacaaaaaaagttaggcgggcacggtggcgggcgcctgtagtcccagctactcgggaggctgaggcagggaacccgggaggcggagcttgcagtgagccgagatcgcgccactgcactccagcctaggtgacacagtgagactccaccccaaaaaaaacaaaacaaaaaaagaaagtaaaggattatttttaaaagattatgaaatacatccctaagtaaccaagcctcaaagatgtacatcaaagaaatgagggaaaggccaaaacttttgcttatgcttattaaacactataatctttggctcagccctgacccaatagcggatcttgatttcctctccagatttttctgtcatcctcacccactctgcccatccatcactgaaacagaacattcctctgcttacatacaccctcactaccacctgaattcttacatactccctcactaccacctgaattctaggacccaagtccagggcccagagccccagcttcttgcctctagtatcttttcactaaagccaatctcttgttaccaaccccccaaaagtggtatttactcaacagttttcaaaataaaatatgcctcaattataatttgtgcaaaataaaccactaktcataggcatacacatctacagataaaagctgtaaaagtaaatataactttaaaagtctgccacttttttcctttgttaactcaattmttcgttaaatttttacttcgctggaggaaatatttgctctagagagtgtatttcttaaaaggagaggactgctattggtatttagggaaggacgattcattgtgccagaccgtgccacacatagtgagatgtttagtacccttggccctacccagtgagggcaataaagatgacttcaggaatgcagcatggctagcaaccaactacaccttggcattgtctccgtggaagaggaaatgggagtgactcccagtggaatgtaagcccagaagataaattaaggttgattgcaggaaaataaaattacatttcttgcacatgagtttgggagtttggggatgaagcttggcactcaattaactcctatgyagcggaaagaattcaagattaggaacagcgctgccatggacatgtatacaacacctaagcgagcaccagtcaaatcatatacattacagccttgtctatttattaagacaaatttctcattaatggaagtatcatgagagggaggcactttttctaatttgagcaaagatgccattatggactagaggcagccctactgggagtttgaagaccttgggatctatgctcttacaggtcacttaatcgstatgcaccattttcccatctttcaaaaagatataaagcaaaactgttagaggactggtaagtcagctgactgtaaagaagataaacatgaaaaataaaatgaaacatattttttagaaaaggaatgcatgatattttacatttctttttaatttgaagaaagattgtgggattagacagmggtccccaaactatcttagttcatgagcccttagttcctcagtaattttttcattgtgccccctaggtttaaagaaatactgaataggtccgttattgtataatttagatacaaacagcgtatttctgacctaaaaactcagtacctttaaaaaataatgcacataaattgaaagaaacatatttttgtataattcttaaataatcatactaacagatgggtgcccgcctagcacagcacaatttttcaaactttagaaacagactgaatgttgccaccaatctttcctgttccacattgacaggtacttcatyttcatcatagtaactttcagaaacctacctttccaatgatatgacatcatctaaaacaatgtagtgcaatctaatattgaaatatgtgaactgccctaaactagyacattgaacaatgtctaacacatgccaagtttctctcaaaatttgtcccatagccccttgtgagttygctatggcatctcattctcagaggacctctgtgcactgtttaagacaaagggattaggacaacgaaaccctagacacattgagcttaattgtggtaaaggtgtttgtaatggcctaatattcacggctctggaaagctataattaagttaaaagttcagcactcaagagcctgtttattttcttttgggcacttgagataatgtcttcagaaacattatgaaaattctgaggtgctgtaacagtatttgtaaaattagctggggaaagagttgtccactaggatgtaagttccgaaaggccagggagttttgtaacctcagtgtctagaataatgtctgggatattactagtccttaataagtatttgataaattaatgaaagaaacacgaaatcacttacatattgaagtcttggtgtttttaatagagttgcagagttggcttgggtttcatccttttctctgtttttccttagtcagtgtccttccaaatgaaacctaagcaacagtgtagttacagattatagatgtaaaagtgtttactgcaaatatttgctccataaatagttaatttttaaaatagggaggcaaagtacggatggtggtgaggatacaggctttggggtaagacaaatctgggtttgaattgagtgacatcaaatttcaatcatcaaaatttaatcaaattatcaactttcaaatcaattatcaaaattcaattatcaaatttatctgggtcccagctttttttaatgyaatttagggataaacataatattagacatggttgctgtaaaggttaaacgagaaaacatatgtgaagcacttagtgcaatccttggaatatatgaagtgtaaatgagrgctattaccctattaggcaattttcagtttacttggctcatctcattcctcactcagaaggtgagttttaaggcatatgagtaggactgtacattatatacaccaggcaaatgctactttagcactgccctggaatgcttttccactagacatccacttccttcctgtgggtctttgctcaaattccccttagtgaggcgtacacaaaacttgctatttataattgcacctctccatactccttaccctgatcagcttttctccctaacacttatcaccttacaatatactattttctattttgtttattttgagtctgtccttacaagaacataaactccgggaaggcagagatttttgtccgttttgttcaatgatgcctaaggtcgtagatcagtccccaacactgggtagtcactcaataaatatttgtagaattgaatttatgtgatgtgaatatattcccactgaattttgtactttttagtttgggtccatttagcttgtcagcatgattttgaaaaatgattmcccgctttcatcctgcatctttaagtatgactcatcactcacataccatataaccagcactcacagaggaaagctccaggtacccagctcagttcarttactagctgtgtgaaccttggcaatttattcagcttctctgtgtcttgaatgcatcatctatacatggggataaaagccatctctactccataaaactgctaatgaggattcaatgaggtaatgcatatggagtgcctacaacagtgcctggcacacattcaataaatattagctattatgattatatttacagccaagtccaggaccctctcctctcagtcctgttctgcatctctattcctcccatgctggagtattcattctctcctgacccacgctttctttcatttccacctcttacccatcagttctgaaaatgatgtcaaggtctcttcagtgccaactctgctctgccctcctttttttttttttttgcatttgtcattagatccaaactgctttcacaaggttcagctaattccctgactaacctgtgcctggactaaagcttttataacaatgtgattctaaaaaagttcccacagaaactagagggtaacattacaaatttacttggccttaatccagaactattttaacaccatcttttatcacataacttactccatttcaagtttttttttaagtgtggcctccttcacatcttgtgcttrtactattttaaagagaaaaacaatttaaggtcttataaaacaattttgtttgccttgaaatttatttagaaattttcraaattttgtgtatatgttctctgagctttattctgagtccagaggaaaagaaaatatcctctttcctggatgggctgtgccatctcatcttgggctgtgaagtctgccctaccccatgccaccagtctcaggggaaggaagctgccagagaacttggctaaaaaagggggatggggagtaaaagatccaaacgattaaatttccagctctcaaaataacccctgactactcctgtcacctccaaatcagggcttgcacacttcttcatgctggcaaagtgccacccctctggcctgatcccagggggccctgatgagctatggacgcccctttatctctgcaagacagccacgtagagaagctggggagctcactgaattaaggrtggacatgcaagatgtattttctcttttcttatactcttaccattcttctccttaatctctcttctgtcttcccctccatctgtctccaggctcctgaaaggccccgtgatagtgttttctaaaacttagtaatttgagtaccactatcacgatgttcctctcccctgctctgcctacccctccgccccaccatatccaaattccacctgttctatttgatagcttactttttcacttaaaaatgcaaaatctagctcttgatgtatatcactgatttaaatttaaaatcagtttccttgccataaatagaaagctccctgataaatgtaatgcaaataaaaacatatagtagtggaattttagttggatatggctgcttgctgcaggcctgtgcctgaaacctgctgttaggttaagaaatgctggagaagtgttaaaaacatatcagcatcgcagtgagacttgatctttgaaagagagacacagaaggacaaccgaaaagagagcagctttctcaagaggtaaataagtttgttgaaatctgataggcttcatcccatttccttcaacaactgagtacactatttgctaactgtactaaaaaacgttttgcacattttttcttattatttgctcacagcttttgactaccagagaatgtttcggatacaggactaattcctgtggatgacagaatgcgaccgttgaatgggacattgggtgtcatctggtccaaatcttgaccccttttcattttccccgaaagaaagacttgcggctcggaaccgagggcggcatgcccaaggtcacagaaagggtggtctaatgttttggttcctgcagcccagagaacragctatcccatcccacaggagccttggcgaaaagctscccggccggcgmaaggccagacttctcgcctccactgtgttgattgcggttgccagggcagcggcgcattgctccccgcctcgtcctggtgacgtcacagagcaatgtccaatgggaaagcagctcggtgtcacgcacctcctatcccggcgggcaccgcctgcgccgcggcgagtgaggcgtcgtccgtactggaggctagctcttgtcgcggccgcggcgagwtarcatcgtttttccaatctgtccgcggctgccgccacccaagacagagccagaaygttcaggatgctgaacagcagttttgaggatgaccccttcttctcgtgagttacgggagccaggagtccggggtcgcgcgggaattaaggtatcgaggggagctattttaagggaaaagagcgagttttagagggcgagagagaattcggagtaactctggaggcggtttgaaggagacgaggatttggaggcctgggagggaagagagaggaggatttaggggtgtgtgagacagggaagagacggatttgggcgcatgaggtggagagaggagggtttggacgcgtgaggtaggcggagggaagtttgggggcgtgaggtgtggggaggagagttaaggctgggagtggggggagaagagttgaggccgggaggtggggggaggagaattgagggcatgaggtggggagaagaggttgagggcgtgaggtgagggaagggtttgggagcatgaggtgggagggaggagggttgagggcgtgaggtgaggggaagggttgagggtgtgaggtgaggggaagggttgagggcgtgaggtgaggggaagggttgagggcgtgaggtgaggggaagggttgagggcgtgaggtgggggaagggtttgaaagcgtgaggtggggggaggagggttgaggctgtgaggtggggggagggtttgggagcgtggggtgggaggaggagggtttgggggagtaaggtggaggggggagggttgagggtgtgagatggacgaaggaggatttgggggtgtgaggcgtttggaggagggttgagggcgtgaggtggggggagggtttgggagcatgaggtgtgggggagagttgaaggtgtgaggtgtaggaggagggttgaggacgtgaggtgggaggaggatttgggagcatgaggtgtgggggagggttgagggtgtgaggtgaggggaaggagggttttggaccgcgaggtggggggaggagggttgagggcgtgaggtggggggacggtttgggagcatgaggtgcaggggagagttaagagcttgaagtgcagggacgagggttgagggcgtgagttggtggggagggtttgggagtatgaagtgcaggggaggattgagggcatgagttggtggggatggtttgggagcgtgaggtggsggtaagagggttgagggtgtgaggtggatggaggaggatttaggggctgaggaggatttgggggcatgaggtgtgggaggagggttggggagaagggttgagggcgtgagttggtgggaagggcttgagagcatgatgtgggaggagggttgagggcgtgaggtagggggaagaggtttgagggtgagaggtagtgggacgagggagggttggggcgtgaggtggagggaggagggtttgggggcatgaggtgtggggaagagggtttaggggcatgaggtgtgggggtaggagggttgagggtgtgaggtggacagaggagagttgatggcgtgcagtggggggaggagggtttgggggcgtgaggtcgcaggaggatggttgaggacgtgaggtagagagttgagggccccaggtagggggaggaggatttggctgcatgagatggaaagaaggcccttcctcacactcccggggtgcctgctgctttccatttggccggactttgggtgcccgtcatggcttcctgtgtgcagagttggcctttgcagcttcaagggctttgcaggtgacataactaccatctcggtgaaacttatggtgagaattatgttcacataattgcaaatgggagcagggaatattttatagctcctctttaaattccaaataggaacaggtaatattttatagcatgacagttcattgaaaaggggaagtttttaaaacagcattttccatgtgagtggggaatgtgtcaatgagagcacgacaaagttggagagttgtgctttctcttcgaagttgttggaagttgccatgccaaktgcgctgttttctttgctcgctttgttacagagctaaccttgtttgtgaagggactccgctttctgtcaaaactagaaataggacagggaagctgatggggcggggcggggggaggggggcgggaggagggcggcggtgttgtgtgnnnnnnnnnnnnnnnnnnnngggggggggggggtgtgtatttaacacctcaggtaagcaagtgccattcgttgcctttgaaggttcccagtgaagtaatgtgatgccctagaaagaaggcatccagaaattggtttcactattatttatttttgagttgtgggattttttttccttaattctaactttggccattgttacaaacacattgacatagtctagttgtatccctaagaggggaaatttgtaatactttttagcctaagtgttttttgccagtttgaattttgatttcaagtctagtttattttgatcccttaaattttctaggtttgcaatttggagagcattttttaaaaaggtcttaaaataagagtttattgcacatatttttcaaacaatatctgtggggggtgtgttgtgcgtctgtgtttgtttgtttgagacagggtctcactgtgttgcccaggctagagtgcagtgggttgctctcggctcactgcagcctctgcctcccaggctcaagcgatcctcctgcctcagcttcacaagtagctgggtccacaggagggagccaccacaccctgctaattttttttgtagagaggaggtttcgccgtgttacccagactggtctcaaactcttgagcttaagtgatctgcctccctcggcctcccaaaatgctgggattacaggcatgcgccactgcacctagccaatgttgttgtttaaataaatgattgacttaaatatgttagtactaatttaaagcaaaataacattaataaaaagataatgaacagtgggaaatgaaatggttaatatagaaaaataaaatgattaaaatttttttctgaagattatttattaaggcatacatgaactcaggcaaatttattatgccattttagttaacgtgtttaggagctgttgggatatggacagtgttattttaacaggtttaaatttttgtattattrtgattctctcttttgaaagccagaggcgaggcttggtggctcacgcttgtaattccagcactttgggaggccgaggtgggtggatcaccagaggtcaggagttggagaccagcctgaccaacatggtgaaaccccatctgtactaaaaaaaaaaaaaaaaaaaaaatacaaaattagccaggcatggtgacacacacctatactcccaactacttgggaggctgagacaggagaatcacttgaacccaggaggtggaggttgcagtgagccgagattgcgccattgcactccaacctgggcaacaagagtgaaacactgtctcaaaaaaaaaaaaaaaaaagaatatttagccagagaatattattttgtaaaatccataattttattattttgtattacataagctctggctttcaagagaatcacagtactacaaatccatagattattgaggtgttgaagtcattcatatgtaaatatgacatcatacaattggtaacagctaagaagattatgatagacaattttcgagttgtattatatccttgattataccaaaagttgttttatatccttcattgttaaggattccatccttaactgtgaatgtgtaatgagtataatatgttctttaaaatgtctagcagaagtgtaatttaaactcttgagtgattctgagcagaggcaatgaattcaagagtcagggtcagaaatagtaacagactacaaatagtaagcatacagaagaactcttcctctgtgcttagggtgaaaaggaccatcagttactctttcagttatcactatctatagcctttttcaaatgcaaggwgccatatcataaaaattgaaggtaaaattgttgcagttaactttttttaagcctaatytcctttattcatcacaaagcttttgcatagaccttttaaatatacaaaatagtggccagaactctgcttacagactaccatctttcattaccaccatattacagttaattttataaaattgattcacacttaacaatttcttttctccacaatgaattatatttaacacacttttggggataagggagaaaaagaatatgagtttatgtttatttcrggtaatctatttgacccacccgttttacctcaacccccaaacaaaatgagtatccatttcttaagttaaacataaagaattcrtaaaggtgacaaactccttaatgaatcatccactgaccttaggaacatagagatgtgaaacacatagctcatgcccactctcttttatataaatattatccctgttgctaacattgtggtgggtgggtcatagagtcagtaaatgttgtttaatggtgagttggtgtcctttattctctttcttgtagtcaatctggtatttagttgattgctgaaagtaattatcatttgcattcaacaaataacattgttgatactggtattttctaattagaacattacsattttctaaatagtccattagagttgcttatattgttcacaatcaaggttattcaatataagcaaacgctactgatttactaattattcaaaaatggacaaaaatgtatacttctttgatataaaaatagaattactagatactacgatgctgataaggtgctgtggttaaattkttaattgcttaaaatatttaagtaaaaagtaattaaaatctgtagttttgaattcaaatatattcagtttcaatgtttaccttattataacagkgcatcttaaatgtttcttcagaaaagtaaaaggaaatgttaaaagttatattttaaaatttggtgttttattacatacttgggatttttaaactttggtatctcattatgtctcagggctgaagttatttcattgaaaatttacattacagtatattcagatataccttcttaaacaatatctgttacttgattaaaaacacaaaggttaaaagctagcacttcctggcatgcagttctctcaagaatactatctttctctcacatctgtatttgctaacaatatgcatattgttaagtacatatgtatagacaagaggattttgaggttaaatggttttggcatcctgtaccctaaaaaacatcgattatgtagtatgaaagtttataaatatttagtacgacccagaattttctatttgatacgaaacaggaactgtgaatcttctgagctacaaaaatgtaattctgatygagcaagtctacaaagaataataactatgttaccacttaccagctattggagatagaaagctcagaagcaggctggcaaacctgtcawccttaatttttttttttttttttttgagacggagtctggcactgttgcccaggctggagtgcagtggtgtgatctcgcctcactgcaacctctgcctcccaggttcaagtgattctcctgcctcagcctcctgagtagctgggattacaggcgcacaccaccacacccggctgattttttgtatttttagtagataccgggtttcactatgttggccaaactggtctcgaactcctgatctcgtgatatgctggcctcagcctcctaaagtgctgggatacaggcatgmgccaccgcacccagccaaccttaatttttaatcataaattattgttgtctcttctttaagcctctcagctctccatatgagcatcatatatctgatgaccagtatttggttaaagtactgcatatattcacaggatgttacttcttctatctccttatatgtataatctctattttaaaaatttttacaaatttgtatttattttatacttggaagtagttggatttattaaaggacattgctttgtcctatccactgatggagttcaaagtgaatgtattctatgtacaagatgtgggttaacttttttattgatggaaaacattctcattgaaggaaataaaaccaccttgttaagcttttggaaacagtattcaaggttactacttaaatacttgtttagacgtacagtctgaggtagagtctyygccaaattgtcatagcttggctctagttaatattctgccacatatacctctcattctaaacagttgataaaagtagcttgagaatactcagctaaaatttaagttactkattttcaaggtcccactttattctaagaccctgaatacctactgtgaaattacctagtataattgttcttaggaatattttaatatataartttcttataaatgaactttgcaaattataagatcatatttgaaagaatgagacactgtaagccttgtgctgaaaggatttctaaggtatactattcatttggggcattctttggttcatgaggtaaacaccactgaattaggagcccaggaacacagcatgactaggacatggttgctgggtcaaaaatgccatacagtagcatgtacccacaagataattcctacttctgccaattaatattgtaaatatccatgaaaaaggagtgaactatttatagaatatcaggggagcataatcatttccacaatttttttgatatcaaaggcttttgccacaccaacactttgtacttcaagacaatggaaaaatagaattgcttaataaaaatgtaattcattctttaaatatttcttcagtttctactataggccgaaccctgtgggttctcttttaaatttttagatgtcttggttcctgccctcaagatccttctttgaatgttacatgcattatttctagtatcaaaacatggatcttctggtctattttccttatagaccagtctacctcattgaaactagggaacatttctttatgatcaagagaaccataaccatctgctggctaagcttttgccactaccatgtataatggaagggaggaatttcccttaatgagtgagcctgccatgtcagttatctgagaaccttatgtaataggtaatgctctttgcttagaagcacaagtatctatattcttatatagatgaaaaagaagtgtaacttaggcaaaataagtgtgtgtgtgtgtgtgtgtgtacatatgtatttgagagagttttaaaaacaataaattattctaaagggagacattaccagcccttaaacacatgtatgtacgtatgtacatacatacatacaaacacacacacacacacacacacacgtacacactatgttgaaatcattcccaagtgacctggaatcaatctaagagttaagacataaacacttttgaaggggaagtaggcaacaatttatttttcctgccttgtgatatatgctgaaggtaaataatatagaatagaaaaagtacgtttgagaccaaagtttattcagtttggttgtggtttgtgtgagcaattctaagagaggaggtatatagtcatcagtgagtaaaagtacatttttcttgacctaaatgaaaatacatcctcatggaaaatctgaaaagtatagaaagtttggtagcagaaataatacaacccattattttgatgtattttgtttcagatgtccacatgtggatttttattttccaaaattcggaccacactttatggttaattattcaatgcttttctgcaacatataccatgaacgttttcctggtctttagatattcactaaagcatgactttagagtctgcaaaatattgcaccctatgaacatacaaagcatatttctcacrtaaatctttaacaacattttcaaattattaccttagactctttgtgtacatgaaatgactagtttgtatagyatgacctttttaaaacctcctatttccaatttgttttcctagaagaatgaaattttattttcaaaagagaacattatgaatgggctaaaatttttcatttgagaaaaaaagcctaggttaattttaaaaatattaaaacaactgtgtgctaccatagaatttttttagttttgataaaagtgaattcaaacttggacaagagaaacattaaagccttatctccaagcagctgcctttctgggtagacatgaattaaactcactagaagtttcagccagatttcttcctgaatggttcagacagttgcaaacaccagactataggctcgcttttgtttagtgcatcttccaacaggcagtcatttgttcatgtcactcagaaarataaaatttttagcatttgctgaacatacacatattcaaataaacatttaaatattcccctacttctatataaagaaagaaaaacccaggcaaattttaaatgagccatattttgttgattaatttttagcccaattataatgcaatgagaaaaattaattttactaaattttgattctgtagaaaagtaatagctgtttagcactcccttattcaaagaacaaatttagtatttcttgaaatacttttcttcattgtagtcaaatcacatctacatatctaaaggaaaagttgactggttttcctaagtaagtatatattaataggaacaagmattttagtctccatactttaaccatactctaagctgtaaatgtccagtgagtttggagctgtaagcaaaaggacctccttttgaaatgcctgttttaaaacatcaaatggtatgaaatcctttaacctcatgcagttacatttattatgaaatatttcaaacatactgcaaaggtataacgaatactttggaataatctggtttttgaggtaggagttagaaaatgttccatgggtaactcatttgtgcattttagaactacttgaaactctgtaccttcaaataaaaagtagagtggggtggaagkagggagagcattaggaaaaatggctaatgcatactggacttaatacctargtgatgggttgatasgtgtagcaaaccaccatggcacatgttcacctatgtaacaaacctgcacatcctgcacatgtaccccggaacttaaaaaaaaaaaagaaagattttgtgaggtggaaaaaaaaagtagagtgataygtatgccaaattttgaattactaatttwaaagtaattttgttcttcataatctgattttggaaaacaaaaaacgactccctttctgccttctagtgtgctaaaacatgagctgctccgtgtgtactattgatctgtacacactgagattttaaattaaaattaatttataaattgtcacaacttctttatagtgcttgttgcatataattttgctagaatagtgattctcaaacttttaacaggtaggaaatctaggaatggtagtcttaaatttccttkgcccctcaagacaaaaactcrtactaaaaatcctacaagaatctggtatgtggctgggcatggttgctcacacctgtaatcccagcactttgggatgctgaaacgggcagagcccaggagctcgagaccagcctgagcaacatggcaaaatcctgtctctaccagaaaaaaaaaaaaaaaaattatccaggcatggtagtgcaygcctatagtcccagctaaggaggctgaggtgggaggatcaattgagcttaggaggtcaaagctgcagtgagccatgaacatgccacaytgcactccagctgacagaatgaaactctgtctcaaaataataatatgccatgtaagaagcttaaggttaccacttcacgctaataacaaattaaaaactgaacaacctgagaaaacaacttttcttgtatatagcagagaatcgaggtcacagggcaaatctctgcccccataattggasataggcagatagagagaatcacaacttaactggtgcagaaacctcttcaggaaccagtgcgagggtagtaggaaaacctgacctgtagttgacaaattactggagactcagagtggacaagtgtcagagttaagaactccatggtcccccataattttgtgagttttacctccaggagctctaccaggttctcccagtgaatattggaaaaaatcttctcatgcttccagcagaagagaggggtggaaagtaaccattaaatatgccagagcattctgtttttcttagcaaggcctgcagtcaagagaaacttttttaccaaagcccagtctgcctgggggaaggcaaatacccaactccagctcctccagccatgttatcacactggaggggaggactaaggcacactggtgaagtttacaacccaaggctaggctaagccaaagactgtgagttaatcttatgactacagaacactttgcctcccacaacaccttaccactacattactaaaggtstatttactgcagttccctttacccagtaaatatgtactactttcaacaaaatattacgaggcatactaaaaggcaaaaaaacagtttgaagaaactgaacaagtatccaaaccgtatttctagcaaggaatattggaattatcagaccaggaawttttttaaactatgattaatgtgccaagggctttaatgggaaaagcagacaacgtgctagaacagatataagcagagaaatggaaattgtaaaaataaaatgctagagactaaaaacattgtaacagaaggccaggcgtgtggtggctctcggctgtaatcccagcactttgggaggccaaggcagatggatcacctgaggtcaggagttcaagaccagcctggtcaacatggcaaaatcccgtctctactaaaaatacaaaaattagccgggcgtggtggtgcatgcctgtaatcccagctactcgggaggctgaggcaggagaatcacttgaacccaggaggtggaggttgcagtgagctgagatcgtgccattgcactccagcctgggcaacagagggagactctgtcaaaaaaaaaagagagaaatgaaggattccttttatgggcttatcagtggactatgaacagcttaggagagaatctctgagcttgaggatatgacagtagaaacttccaaaaytgaaaatcaaagagaaaaaagactggaaaaaaaaaacccataatatccaagaactgtggcaagaactgtagggcaactacgaaagatataacctgtaataggagtaccatagtacaaaggaacagaagcaatatttgaagaartgaagactaagaattaccccaaattaatgtcatacaccaaaccacagatctcagaagtttagagaacaccaagcagaataaatgcaaaaaaaaattaaacctaggtgtgtcgtatttaaactgtagaaaatcaaagataaagaagaaatcttgaaagaagctagagggggaataaaaacctgtagaagagcaaagaaaataattatatctgacttctcttcagagaccatgcaagcaagaagagaatggcatgaaatatataaagtgttgagaggaaaaaaacccactgacctagaattctgtatcctgcaaaattatcctttaaaagtcaagaagaaatagactgtctcagacaaacaaaaatttggtgaatttgttgacagtagacctgccttgcaagaaatgttaaaagaagttcttcagagagaaggaaaatcatacaagtcagaaactctgatgtacattaaaaaagcaagagcatcagagaataagttaaggtaaaataaacacrtttatttttcttattcttaatggatctgatagataacagtttgttcaaataataataggcacacacacatttaatggattgaatgccaatctacctcttatattcttctccttccctttcccccaagtgtatatcccggccttaagtctgctcagtaatttccagcagcaaaatgttcttttctcctttgtgttgctaatttaaagcagtagttgaaaatgactgtatatgacgggaaraatttaatttgcagtcactccactcttcccctcactttctttttggatgatagattattgcccccaggtgctattttgctgtagggaatctcagaaataaaggaaccaacagaaaggataatgtgaggacacagggatctgcaggtcaaggagagaagaggcctcaagagaaatgaactttgctgacaygttgatctcagacttccagcctccagaactgtgagacagtaaatgttgtttaaaaaagaaataaagggaaagaaagaaagggaagaacaagaaaatcagctagagaagctaatttaatagaaaaaaggtatgtctattcgctcttataattaaagagtttgggaagcatgtaaaaacaggaaagctacttaaaaaacaaataaaagggcagtgcaaggtctgagagacagagatgggaaatggaagtctcagatattgaaccaaactgtaggaccaagtacacataaaactactcccccctaattcaattccgtggaagtaactttacttttattcatttcctgacattcattaatttattttattctaaatatattatttcaaacatttgataaaaactgacatcatgaaagagagaagctatgctaaccaaacagaagaaccaacacttaaggaatcaaaagttaatgaaacaaagaagattctagaaaatagtgtaactaaaatcttgaggagactttmatttctactgtgaccaacagagctccaactggaccaactctcttgcagataactttataagcccaggatgaaatacaaaaacaacttactggaaaagatgctagagaatgaccaaaagcagatatatgctggagaggtctcaacagttgaacaaaaggaaagacaattctagcctaattgtcttacatgtagagtgactaaaactgttcgaagacctttaaagtctttttgacctaacaaccaaagacagagttcagtatagccacagtcactggaaagggagggagagaagtccccaaaaggagagagccagagaagagtgagcaccaaatactgtgaataaattctgtacaaatctgtctaaggcttaaccacgtatgcataagacagactcagagcagttcagctaagaaggataaatgaactaaatggagatttgagctaccacgcaagagacagaatttgacctttaaggctaaccagattaattacctatttttaaaaaatcaaaactctggaggaatatatcaaaatccagaccctatacaacataatatccacaatgtacagatgtaacccaaaattacttaacaggaaaatgtgacccattctccagataaaaaaataagacactgatcctgaaaagacacatatgttagaattaaaagacaagaattttaaatcagttgttataaattttgcccaatgaagtaaaggaaaatatgcttgcaaggaatgaaaggatatttaatctccataaagaaagtgtgtgtgtktgtgtgtgtgtgtgtgtgtgtgtgtgtgtatacttttttatgtatataccycccccyaccaatagaaagtctaacagggatgtccaatcttttggcttctctgtaccacattgcaagaagaactgtcttgggccacacgtaaaatacactaatactagtgatagctaatgagcctgagcaacatagtgggacctatctctacaaaaaaatacaaaaattagccaggcacagtggtgcacatctgtagtttcagctactagggaggctgaggtgggaggatcayttgagcctgggtgtttaaggttgcagtgagccaagatcatgccactgctctccatcctgggagacagagcaagactctgtctgaaaaaaaaaaaaaaaaaagaaaaagaaaaagaaaaataccttgctatagctcagatgtttgaccctcagaatgtcatgttgaaatctgatccctaacattggtagtgggagttaatgagaagtgtttgggtcatgggagggtggatccttcattaatagattaatgccctccctggaggttagggtgaggtggtaagtgagttctcactttattggttcccagagagctgagagctggttgttaaaaagagcctttcacctccccacccctctcttgcttccactcttaccatgtgatctctgcacatactggttcccctttaccttcctccataagtggaagcatcctgaagttctcatcagaagatgatgctggctccatgawtcttgtcagtctgcagaaccatgacccaaataaacctcttttctttgtaaattacccagcctcaggtattcctctatagcaacacaaaaattgactaagacatatcttcagagttgggagaggatattttctttagagatgtcagagggtaatgcagccatttaacaaagaaccagagatacagaaattaaatttttttagaaaaatgagttaagcagaatgttcacaagcaaagagtaaattagtaagcttggaaattgagtcaaggaatttcttccaacattcaacacagaatcacagaggataagaaaaatatgctttaaaaaaagtttgacaaagaaggcaaacagatagaaataaggtaakagtaaatacccaaagaagtaatttaagaacaatttctagaattaatgaaaagctgaaatgttttggaactcagattgaaaagagcaatttaagctgggcgtggtggctcatgcctgtaatcccagcactttgggatgctgaggtggatggattgcctgaggtcaggagttcgagaccagccaggccaacatagtaaaaccccatctctactaaaaatacaaaaaaatttgtatggcatagtggcaggcacctgcaatcccagctactggggaggctgaggcaggagaattgcttgaacccaggaggcggaggttgcartgagctgagattgygccattgcactccagcctgggcagcaagagtgaaactctgtctcaaaaaaaaaaaaaagaaaagaaaaagggcaatttggtggttgtcgggataattttttttaatctacacttggacccatgaaagtgcaattttgatacattaaaaaaatatatataaaaaaaccataaagcatccagagagtagatttcttagaaagaatgagaaccagattgtcatctgacttctgttcagctacactagatgtaggaagatgatggagcaatattatcaaaatactgagaggaaataatggagatttatatgcccaagcaagccatggtttaagtttgagtgtgaaatgartttagacgtaagatactaagggtttactgtgttcaaattactagatgttagaatccaggaaggaaataataagatacaagaagcagtggtaattcagaagtaaaccatcatcaacttttcttgatggagagagactgaactagaatgctatctcttcccctgttcttttaatggaattgtttctcaccatttttccattccttggagctagcacaggacagattaaaaacccccgactagctcatacctgaagttttgaacctggatgacttggagtataatggttgtgcctttagtagaaatagagacataaagaggaaaagctgattaaggaaaaaatgtggaaataaggtttcaagttactagaatataaaaaggcaaatatttaatcatagctttatcattatttgtaatttatattttgagtactttggaaagtatgccaacttcttggccaataggacattgaaaattagctttagaccttcaaagttcagggctctatccccactacctggaaccgtgccttttacatatgtgttcattaaatatttgttaaataaatgagacagtttgcattaaaacaagaaattgaatgcagattcctgataatattgttgaatagactgaatgcttgctaaaatgcagattaatgggccatgcttgggatatactaaatcaaaattctaggtatatgtctcaggaatctgtaattttaataagtacctctagtgattttttaaggatgttcaagttgaagtagtccttagaggacagggaagagaacagataatggattaaaattggagaaagcatgtctttagggagcagtgctttttaacattttaatgtcattcatttttaaaaggtgtttgcccatgtacttggggtacgagaagggacagagaccagagcgtaggtaaccagctccagggcttagtcctcactggctgccccaaggctgagagtatcaacattttgagacaccagtaacctatctgtgacactcagaagctctgtaaagggccagaaggaaaaggaacaattaaggagtttatcagagttcaaaacaatgcattgccatcaaagttagagatacatgctgctgatccccactccctggtattcatgcctttatgtaatctccccttgaacatgggctgagacttactaatttgtttctaataaacaraatacaaaagaagagataagatgtcactcccaaaattacatttttaaaagagcatggcttggcctggtgcggtggcccacgcccgtaatcccagcactttgggaggccgaggcgggcagatcacgaggtcaggaaatcgagaccatcctggctaacacagtgaaaccccatctctactaaaaatagaaaaaaattagccgggcctggcggcgtgcgcctgtagtcccagctgctggggaggctgaggcaggagaatggcatgaacctgggaggtagagcttgcagtgagctgagatcgygccactgcactccagtctgggtgacagagtaagactccgtctcaaaaataaataaattaattaaattaaagagcatggcttctgtcttaggtgttctctcacacatgatggcttacttcggggaaagagctaccatgatgtaaagcarcactgtggagaggtccacctgaatgagcttagaagcagatttttgagactagccaatagctgtgtgaaggaacttggaagtggattctccaccagtcaagacttgagatgactaaagcctcaactgataacttcattgcagcctacagagaggccctgagtcagaactacccacctaaactgctcctgattcctaatcaacagaaattgtgacataacaaatgttgttttaagctgctaagttacaacagcaatagataactaatacatgttatgtcagaataacacattgattgagaccatcctggctaacacggtgaaaccccgtctctactaagtacaaaaaattagctgggtgtggtggctggtgcctgtagtcccagctactcggggggctgaggcaggagaatggcgtgaacccaggaggcggagcttgcagtgagccgagatcgcgccactgcactccagcctgggcaagagagcgagactccgtctcaaaaaaaaaaaaaaamaaaaaraarcagaaaaaaactgccctcattctaagtcatcagttttgttgctttcatctaaagacaggaaaatgaactacaaatctacaaaaagtttatacgtgtgtttctgcatcataaaaaacagatatttatagatattcgcaaaattttgagaccacattcaggatggcctcaattaaracataagcttctatggcataaacaaacctcatttgaggrtgktgtttctcagacatacaggtggtcttactctgcagcagctgaaactgaagcacaagaagcccttggaactatcatcaggacatgtaagtcccatgtactaaaatacttgggccagagaaaaccaagtatagtttaaataggagtttcccctcccctaaaatccaaagtcactaaggaggaacttcaagactgcaggcattggttgcagtggagatttttctctgtgtagcaagcaccaaggtgagcagagcctttaattaagaatagttagtaattttgccaagaaatggtagggggaccatctgatatataggatggttcaaattccataaacattatttatttatttatttattttgaatttttgtatttttttttattttattttgaracggagtctcaccctattgcctaggctggagtgcaatggcatgatcttggctcatcacaacctccacttcccgggtttaagtgattctcctgcctcagcctccagagtagctgggattacaggcacctaccaccacacccagctaatttttgtacttttagtagaaacggggtttcaccatgttggccaggctcttctcaagctcttgacttcgtgatccacccacctcggcctcccaaagtgctgggattacaggcatgagccaccgcgcccagccctccataaacatttataatgtatactgtgtgtcaagcacagaggttggtaatatgaatgaataaagatacagttcctactctagaagaacttatactctaaaagaggagtgagacttttgtatattttaaaattaaaattaaaaaacttgtattagtttcctattgcttctataacaaattaccacatatttagagacttaaaacaacaaatyrtcttatggtggagatcagaagtccaaaatgggtttccctgggctaaaatcaaggtgttggcagggctacattccttctggagtttatgggggtgaatctgtttccttgtcttttctagcgtctagatactgctgtgttccttggcttctggcctcttcctccatttttaaagccagcagtgtagcatcttctgattatgacactactatctccttctcwtaaggacccttgtgattacattgggcccactgggataatccaggataatcttcccatctcaaaatccttatacacwttagcaaaatgtggtaaaaactgaagacctaacaaagattcatggttgtgtggctgaatatattcatgttaagagaatgaaaaaggcaagtccaagactgggaaaaaatttaaaacctgtatctgataaaagtctgtgtccagaatatataaagaactcttataacctgatttttaaaaatgggggaagtatttgaaaagacggttctatcaaagaacatacatgaatgacaaataatacaaaataaaactacaatgagatgttatgaccctaccactcaaatggctacagttaaacattgactatcctatatttcaccaagaatgcagtgcaactggaactctcagttacagttttcataaaatttacatactcttctaatacaagccatcagtccttgctctgaggtgtttacttaagtcaaattatgtatacacaaagactagtacataaatattcatagtagctttattcataatagccaaaaactaaaaacagttttgtgattatgatactgatatatgtatgaacttagcaataaaactgaatgaactgaaatagagaacaacatggatgaatcaaagaagcattatgctaagggaaagaagctagacacaaaagatgacatactatgtgattccattatatgaaatctggagaagaccaaactataatgacagaaagcctattcatggtaactagggctaggagcaggtaattatctgcaaagagacgaggaagctttttggaatgatagaaatgttctacatcttaattatggtggaggttatgactgcactttttaaaattcatcaaactgtacaacaaaattggtaaatttcgttgaatgtaaattatgcctaaacaaggctgaatgaaaacatctgtctatacatacaagcacaaatccagttaagcagtttgctaatcttaaactcacacttggaacaattatgctttttttaacctccaaggtaatgtgtgaataaatctgagctcttttggaataggtttatgtatacaaatactatgaaattcagaggaaaagctctttctacttggacttaygagcagaagacagaatttttgagcttcctcctttgagcttcctcctttgagctggagttgcaaggaaaatttcttttttttttttttttttgagacagagtctggctctgtcaccccgtctggagtgcaatggtgcaatcttggctcactgcaacttctgcctcccgggttcaagcaattctcctgcctcagcctccggagtagctgggattataggcgtacgtcaccacacccggctaatttttgtatttttagtagagatggggttttaccatgttggccaggctggtcttgaactcccgacctcaagcaatccacctgactcagcctcccaaagtgcggggattacaggcatgaggcaccacgcctggccaagaaaaaattttaaaaactttctagcttctttatgatgacatcagaggattggaattagaagggggaagggtgacctaagaagaataactgaagtggagaatctgaaaggaggccagactattggagagggagttccactgggctgcaggaaagcataagattgccttggtaaagtgagctccaatcatggtgtaccttaagttctagaacgaggaataaggaattgattagtgggtcagtaactgtccaactggaacaaagttgggaaaccactgtgataaggtaaaaaaaaaaaatttaggttctttaatgagacttgtgatgaaagggtaaatatcagattatagtgttggtatttttatgcaatatgggataaataaagatgttttttttattatgcattaaatgaattatattggataacagtaacakgttttcattaattttatttataactacagatgcttctcaacttaacgataagattacattccaatgaacccatcgcaaattgaaaatattatacatcaaaatgcatttaatacacttaacctaccgagtatcatcagaacatacacattagtttacagttgggcaacatcatctaacataaagcctactttattataaagtgttgaatgtctcatgtaatttaytgaatactatactgaaagtgaaaaccagcatggctgtatggatcattgaagtactgtttctcctgaatgtggagtgctttcataccacagtaaagtcaaaaaaccttaacttaaaccattgtaagtagggaaccatctaataatggatctttatgagataattctattctatttatgaataaaatagagttctcttctactcttcttttatctaacaaacatattagcccaaaataattatttgtartatttacctgcctacttactatttaaactccaacactgaatctttcatgattatgtatattttcaacagtgagtccattcttgcacaccgagaaaatatgcgacagatgataagaagtttttctgaaccctttggaagagacttgctcagtatctctgatggtagagggagagctcataatcgtagaggacataatgatggtgaagattctttgactgtaagttcttttttttaagacagtgagaaggccctgtaggaatttgaagaaaagtattacagaagtatatatctataatgataggatatgactaatattcttgttctakaaatcactattatataaaaggggggacctttggaaaggtgaatcctgaacagtgacttgtcagctatatggaatttcactgtgctaccaaaactgttaggtccatagaagcatatattagaagcaaaacttaaaccattattttttatatttatgtatacatttctcaccttataacttcctctgatatctgaaattagaacaggcaaggaaatatcctttctctcccatactcattgttttaatacttgaaaatagtatcaaaagctacaaaggattgtctttattggaccaggaaacactgatcttctatatggttacgtatggaccttcaaagcttagattaacctttgcttgtatctcraaagccttacaactgaaatatattttcatatgtcttgccttagagcaaagctagaggttacaaacatactcaactaaaaattaaaaaaaaaacaggatatttatatattgtaaccattttcttttttgcctcttttatttcttttgctttttcagcctcatgaatgatagttctaagataacaagccctcaggggtttctataaagatgaatctcagcaattgaaatgtagcaatttgaaattcagtaaacatttaattggtaaattgagaaacttctatataataaatgtcataatcaaatgaattggatattatttttccaggcaacgagttgttctcttgtgccttttggcgattttggtggtatggttcgtatcttaagacacaaatcattttagcaatattttctgacaaatatttatttttcattaactcaagctgactgaattggcatgcagcctcacttccataatggctttttaatgtttgtactgaaaacctctgtttcaagtatcagacttaccttagaaagtttaggcacatgtttcctgaagtaagtcatttcaacatatataaaattcatcttcaaaaataaaaagtagattttattgaatgaatatttgcttgattwacaaaagggatcctcatagttgtgtttgaaagttggggactyccacatgcttatgattactttccaaarggttttttaaaaagtactaaactgtagatagataagcacaacgtttggaaaagcacagattaactgctttctctaggattttgttgccaccttgcccaggcagctttttcttgtctgttcttaagaatggccactctgcaaccagcgtttctaccacctgtttcttagggtttttgtgctgtgtctgtgatgctagcttccaacacactaaaagcattctggggagtagcagaaaataacatgaatttggaacatttgtatctacagtctcatgaaaacggtttttttttaattattttgtgctacaattgaatcatttgtttccttgaagtttggcatacaggtataacatttatccctcctgaccagagtatttagtaagacaaataacaaaaaaaagcagttataacacagagttatgagtaaaatgatcaggaagttcagcatgctatgggagcacagatggaaaaaagcaccttttgaggtggggtgggtcaatccaagtagacttcttgaactttaaggattagtagaagttagccagaaaaggagggaggggaaaggaatactgttcaacagagaggaaacagcatgtgcaaagacctgsaggctagggagctaaaacatgtttagtatcacttagccctggagtatgagttgaacagtagatactgatgaggaagaagaggtaaccagagacttctttagaccgtagaaggagagtaaacatcatcttaaaagcagaggaagcagtgatgacttacgtcaaagtggtaatagagtcatattcttgaaatattagaagagaccatagtggaggcagggaagccagaaggctgttgaagcattcttggtaaagtattagtgatggcttacttctactaggtaatgtctgtggtgataaaaatgaattacctcatttgagagagagttaaaagggcgaatggatggaacttggtgattgacagggttgaaggagcagtagagagggagaagggaagtatcacacccatttttctggcatgaagaataaggtagatgggaatgccactgagataaggcattgattcagtacagatacaggagtgaggtggtcaaaacaatcattttagttttggatgtttggcatttgaggcatctgtgagttttccaggtagatttatctggtaaactgttggatatatggatttgagctgagctagagataatttattcattcattcattccgcaaatatttattaaaccctcttaagtgccaggaattattatatatgtattggggatattgtagtaaatagacaaaatcgccctgccctcagagattatttttataaagtgggaagatagacaataaacaacaaaataatttcagatagtcacagtaccctgaagatgaaacagggtaatgatacagagatggggggaagtgaaggagggattagacaggtgaccagyggtggcctttctcaggtggtgatacttgaatcatgagaaggaactaactaggtttaaagtcaggaggaaacatttaaggaagaaagaggagaatgtgtacaaaatttttgaaggccttaagggcccactgaagtctcaactacattttgtaccccaactttttgtcactccagtgtgttgggtcaccccagagcaagtgcagrtacatcttttgatggttgatttgaacatgaattgagaagagggcagaaatacccaaatgtctaatcttttcctctctctctttttatccttctttgggttaacctttccatatctcatgaaataagaacggattctcaatctagtgttaaagcaaatattcagaatattccctgaattgtgtttgcctctctgaaatgcaaaattaattctacttcagtccttttttacccaaatatatattagtatttcctaaatgtgcctttgttgttccctacaatattaagtgcaggttctaaggaggaatttggttttcccacctattttacattattatatctgtaaaaatccaatagcaatagaacacagagacacaaayagaacttaggaggattcagagctccgcttggttgaacagagaagttcattaaaccaagcaactcattctgttttataacagatgatttactggctaacacattgraatgtgtgcctgacttttattttctggtgagtcttccagtgataaaacctaaaatcagtggtagattttaaaacctaaaatcagtggtagattttcctagagcaaagtttctcaacctcagccctactgtcattttgggcagggtaattctttttgttctgggagactgtcctatccattgtaggatgttaagctgcatccctgacctccacccactagatgctagttatatgctctcttcatctgtgacagccaaaaatgagtatagttattgccagtgtccactgagagtcaaaatcaatcttggttgagaaactactgtttagaggaattcttaactgtttttctgaagacacatacctcatgcttcaagggtatagcctactgacccttcagtaggcagcaaattgaaggcctattagtaaagtgaattgatttctgtcacccagatcctactatgatgagaggaaggctggctacttactcgagggacaacttcygtcagccatgtggtactgctggaggtgacactggcatcttatacgcaaatttagttatttgcatggtggagtattgagagataaggaaaattatgaaaactatcgtatgctagagaatgtatcacttagtatttaacatacaccaaattatgttttgaaaaagtgagtaatgagtgattaggtgtgtatgtgtttttatatatacatgcacatatatgtatttataatgttacagttccctaattatttgtatgttggctctttgggattttgtgtatgcttcaattttctccttaactaatcactgtcattatatcctctaagttatctttgtctggttgattactgcatgagatttcactaaatgaattggaaaaaaatgttttagctgttttggaagatgtatttgcatcttttgtgttgttacctacagttaataacatacttcctgatattctgtagcatacagatgtcagctctttccagacaatggrccaaatrgtgtcaaatatgagaaactatatgcagaaattagaaagaaacttcgtaagtactaaaaacaaagcattgagaacattgtgtatactttgatatattctatttcatagtggctttcaaacasttttttaaccatagtggttaaaaaagataccttacrtgattaacccaataagcaatatttgtatactttataaatatatttgaagcaaaagtttcatgaaaaaatgactatactatttacagtatatacagttattttctagtctatttcatgtattaaaaatcctggttacaacccactaaattgagttcataacctccaagtttgaaaaataatgttaactttgaaaattttttaaaaattggaaaaaaaataacctcaaaaacattgattctattgaaagtcactattgtaaatgaacattttatatgaatttgcataattttattattaataacctgtctacttaaaaggatttgtagcatctgaagagtttcagggttttataaacgactctgaaaacagaaattttaggaataatgtttaggtatagttccctaatagtccaaataaactagtactataataatactctctatattaacatcaaaaccagtcacttgatttgatctgaagaagacccataacattctagtcatccagtttgaattctatggatcatttcagaatgcccaaataatctagggcattattggttttagtaatgtagcaatctggtacctacaggaggaggtacgaaacttgatgtataactaattgattggcttaatgttggcaagattacacacaagggtcaaccactgactatagaagtatcacaggtttgggggcatagcatctttattgaaatctaagccacgagcacccaaagacttaaggatctctgagtgagtcacttattagtctttgtaacgagagtgggataattgtacctaaaatggacgaccgttaggaccctctaggggtgactttttttgggcggaggtaatttttcaagtcacttctcacttgagaacctgggtgtgcctttgactacaccatattggtagttkagtatmcttagtagaacttacagctagtgttgttacttatttgaacwctctggcaataattatttatatttgactcgactgaatttacaatttgtttacctgtagggtcaactttcagtggatccaaatggacattcattttgttcttcctcagttatgacttattccaaaataggagatgaaccgccaaaggtttttcaggcctcaactcaaactcgtcgagctccaggaggagtaagttttctataagcattcctaaagttttataaagttaggggatgatrgactgtctagatcaaattttaactattaaaatttaatctggtacaagatggtggggggacaggagggaggtgtgggggttgggggtaaggtagtcctcactgtggaaaccattaaagctcaactgtatttacttagtttgtggcattttttttgtagcccccccacccccccgtgagggtgccttttttcatgtaaatatctatggatgtttattacctttacatgttgacaaggtaaacaaaacacgaaaagaagcctttgtttcatgaaattaatgtctatttttaagtttacatttgaagtgaattaattttttaactcatgaaatatttcaagtgtacagaaaggatatagagaataacataataagtgcccatattcctgccacccagtttagtcatatcataacatttttctctatttgcttcaagttgtctcttgctttgttttctttttaagcgaaaatgtacagaggcagttaaaccttctaatacattcctctgaggtctattttccctttctccccttctcagagattaccattttcctgtatctggagtttatcattttcacgcatgtttttacaattttattrcttcacrtttctgtcattaaaaaaatggattattttccagatttcccaacattacataaagggtatcatattgcatatgtcctctgcaacttgtctttgctgagtaatatgcttctgagatttattcagcttgatacatgtggccctggtttctttaacttctatgtagtatccaaaatatgaatatattatgattaatacgcttctgagatttattcaagttgatacatgtggccctggtttctttaacttctatgtaatatccaaaatatgaatgtaccatgatttttaaatcattttctgtcaatagatatgtaggtgagtctaatctttcactaattcatctttatacatggctccttatacagagtctaggagtggtattgctgagttgtagggtatgtgtactttcctctttacctagygtttccaagctactatcccagtgattgaaawtgttggcttccaaaactgtggcttgtgagtttccatttctctacttccttgttagtacttatagtaaaaatttaggtttaccaatctaatgaatgtgaagtagtacattttttagttcttacatataaagatgmaccttttaatgatgcttttgccatagttctgctaattaatctcagacattttaattttaactttctaaaagtgacaaacttaaatgtaaacagaatataattgtagatgtcccacagtaaatcatgttagtwgctatcagaaatattcttataatacttccatagagttgatagtcgggaatcatgagattcaagccaatcaatatgactgatgaataattagttgcccttatttgtaggaatcccaccataaacttccttctattacattatctaagacagtcttgaaggcattaaactataattgctacttttgttttaatatttgattacaatttggaaaaaggttaaattgtatgggttctgtttgttgtagacattttcattttaaggagttcaggaaatatcagagacttattaccacagttttaccacaagttaatagtggaactgagcacacattatttttagagcaatagatctatggccatatctctgtaggtaagctggccctgagatatacattctatatatatttaaataataataaaatttctttatttttacagataaaggaaaccaggaaagcaatgagagattctgacagtggactagaaaaaatggctattggtcatcatatccatgaccgagctcatgtcattaaaaagtcaaagaacaagaagactggagatgaagaggtcaaccaggagttcatcaatatgaatgaaagtaagttatcacaaaaaaataatattctttcttataaatttaaaataacagcygtacttgatgaatttttttttagaaacatgtcataagatgtagtttttgaataatgcatgtagagaataccttgtgaaagtaataggattgtgttttcatcctttcataggagagctcttttttatagtgatttttggcaatatgggatattacttatttttattttatccttggaaagtggaatcttttgaattgttattyagtaawatcattaggcaaaatgtgtctttaaatattttttctgattatcaagaaagtacatttgaaaagtataaagacaaaaataatccataatccaaactcaaaatactagtaatattttaatgtatttcttcctaatcattttwtatatataaacacttttttctcaaattattattctacttttatatagtttatattgtgcttattttaatttaccattataattgtaaagttacttatgatgctatttttcaaaagcattttaagtggttaccttaaagttttattgtaaataagccataatttttacttaaatcattctgtactgttcagtacttaggcttttgtatagacaagattttaatttctgttatatgttagattacatgtatgtctctctctctcaagtaaatcttttctttttctggattttgtatttattcttcaatgcatttacrtccttctagtgtcctaactcttctccctgtagtttttaattatattacaatttattaacaaatttaatcattaaatttaaattatttttattaatttttaaatcaatattaagcttttatatttaattgtattaattcaataatgaaattatattaaaatttagttggattcatctcctastttcagaaagtattttgaataatgtttttccataatagagtgtttaaattttaaattgttgtattaaaaaagaaattctggccgggcacggtggctcatgcctgtaatcccagcactttgagaggccgaggcaggtagatcatggggtcataagttcgagaccagcctggccaacatggtgaaaccccatctctactaaaaatacaaaaatcagggcccggcacagtgactcacgcctgtaatcctggcactttgggaggccaaggcgggcagatcacgaggtcaggagttcaagaccagcctgaccaacatggtgaaaccccgtctctactaaaaatacaaaaattagccgggcatggtggtgcacgtgcctgtaatcccagctactcgtggggctgaagcaggagaatcgcttgaacccaggaggcggaggttgcagtgagccaagatcgagcccttgcactccagcctgggcgacagagcgagactctgtctcaaaaaaataaataaataaaataaataaaaatacaaaaatcagctgggcatggtggcccgcgcctgtaatcccagctacttgggaggctgagacaggagaatctcttgaacccggaaggcagaggttgcagtgagccaagatcacgcatctnnnnnnnnnnnnnnnnnnnncagtggtgcagtggtgtgatctcggctcactgcaagctccgcctcccaggttcacgccattctcctgccacagcctcctgagtagctgggactacaggtgcccgccaccatgcctggctaattttttctatttttagtagagacgtggtttcaccatgttagccaggatggtcttgatctcctgaccttgtgatccgcccacctcagcctcccaaagtgccgggattacaggcgtgagccaccacacctggctggggtttgataaaattattcttatgcagtaagatagaagccatgatattgtgacctgtgtttatttgtaacctctgtaattttatcacatttatatatatactgagtatttcacaataatcaacattttgatgaaaaattgagtgaaggaacataatattttaaagcagtcttaagaagtactatcatgtctctattgttgctattatggaagttagattacttcataacaacatgaattgacattctagctgagtaacctgtcttaggaaattgacaacagaaacttgtgaggtcaagttacacagaaagatggttaggtgaatagaagtgctagccacagaagtatacactatacaggaagagtatattcactgtgagatgacccaggaagaaaaactgttagttaatataattaggtcagctggtccattgggtagaataatatgttatccaggcagttgaaaaaatagatcatcaataactagatcatcagtaggaataggagaggaacagacaggaaaacaaatactacttttgtcaaagacccttatatttgaagcagcttcctgcctctgtattgaggttacactaatgaaaacaccagactagactgaaatatgtgggagcaaggcagttactgacagttgataccttaatacttattcccattatttttctgtttgacataggygatgctcatgcttttgatgaggagtggcaaagtgaggttttgaagtacaaaccaggacgacacaatctaggaaacactagaatgagaagtgttggccatgagaatmctggctcccgagaacttaaaagaaggtaaaagttgtttctaaaatagtttggttttttaagaagaatttgaagtaaagttatgtaatttacttctgttatcagaaagttttgatgatcatccaaattgtatccacagtatcttttgtgaaagatgtaataattttatatgaaagctsattattccacacaaatttaaatttatatctaaaaatcaataayagtttaggattttatggttagtaattcactagtaaactatgcctcagaagayagagaccaaaatyctcttaaggaaaactgatatcctgtagtgtagttattcttgtaaaacacattgtaatatggatatagatagagtcatacatttcacactggtaaagatatctagagatatgataaggggagaggggctctatttggaagacttaacaactttcttaacaaatcaaaatttagcatttaatagtaaatttcagacacttgtataatatgtaacagtacatgcaataccatattcgatgtgtattagatattttggaagaattttgcaagaacattagcttcttttagaattcccttttagaatagctgagaaaaataaatttgctgaaaccacatattaaagattatagagatttctgtctggacatggtggctcatacctgtaatcccagcacttccggaggccgaggcaggtggatcagttgcggtcaggagttcgataccagcctggccaacatggtgaaaccccgtctctactaaaaatacaaaaattagctaggtgtggtagcacacaccctgtaatcccagctacttgggaggctaaggcaggagaattgcttgaacctgggaggcagaggttgtggtgagccaaaatcacaccactgcmctacagcctgagtgacagagcaagactccatctcaaaaataaataaataaatattatagagtttttaaatacattttgtacatactctggagctacagtttaatgtggttctcagaggaataaatggataataatatctaattcctatgaagttacactcaaaggcctcaccagaccttaaatagaaatctgttctaagctataagaaagtggaaaattgctacagaaggtggaagccttcacagaactagcagtggacaagtgagtatcaagtaaatcagaagccttatgcagaatttcatatgctaggatcttttcttctaaaatacttgtttaggaatttagagccctagtattttctattgaattgcttgaaaacttgctcccatattcattatagatatttgtctcatttgaaaaatgtattgattaaaaacctggcagtgccaagtttgaataggaaatccaggtcgcayttagagaaggcatgctctttatggatgacctataaatttctggccctaacagtggcattttctcttaaccggcactgtccaatggcattttctgaaatgacttcrgtaatgacaaaaatgctatatatctattctgtccagtgtagtaatcactagccacatgtggctgttgattcacatttgaagcattgctggtacaactgaagaactgaattattttattttaattcaaatataaatgtggttagtgactaccatactgttaacattaaacagtgtttaaactataaacagttaaatctaacaggaaaacagctgttgctgtcttaaattcactgaaatagtctgccttrttttctggktttttttgttttttattttttgttttagggcagggggtacagagtctggctctrtcgccaggctggagtgcagtggcgcgatctcaactcactgcaacctccacctcccaggttcaggcaatcctcctgcttcagcctcctgagtagctgggactacaggcgcgcatcaccacgcccagctaatctttgtatttttagtagagatggggtttcatcatgttggccaggatggtctcgatctcttaacttgtgatctgcctgcctcagcctcccaaagtgccgggattacaggcatgagccaccgcacctggccagccttgtttttcaaagccattaaggaatttttaagataaaacttttcttatattacagtggtttttaacatgtttgtattgatttataaaccattggccattttttaaatgatattaatattcacatgtatatttctcagggagaaacctcaacaaagtccagccattgaacatggaaggagatcaaatgttttgggggacaaactccacatcaaaggctcatctgtgaaaagcaacaaaaaataaatagccatgcatttgatttgtttagttttgattgttttaacagttagtaatggtgctgggtaataagcataagaccaatctcttgctgttaaatcagttctgtccttggcaactttcttctgatatctgaatgttcatgaaggtcctagctttatattgtccctcttttaggaataaaattttgattttcaacaatgtgagtaaattgagtctatttaatrtaaaactctttaaaacatactaattttttaaagcttatatgcttatttcgcttccccagttgtttttgtgttggctaaatattcttttatatttatcaagattgattgcagagcagttctatcacttataattagttataagaaattataatgttaaaaaagtctcagtttttactaacactgtactagggtgatattaataaaggtttaaataatttatctctaattttataatgtgttgtaaagccaactagcttaaaactttaaaaataataaagcaaaactacactagtactcttttatgagaaaatagttactattttgataaagggcaaggataatcaaatagttcattttcagagaaaaatattttaaattgctaatgtacatgattgttttggttataatttatttatagaatgtatcttttctatattacattcttaatattcrccagatattatattgaccattctctttaacttcttaatgtggcatatttcwactctcctttcccacaaacagcttcatctgtctccaaggttaacattctgaagctggagagtccttggagaaactctgctcagcttttttgtgacatttagaaaaatgcatttggtattctccaaaccagaatgatacattgtctcaaaatctgttagacagctgatgggtgtttttgagcaacgtcttaataattcagttgtttctgttttaattataccattaaaaatcagctttagctttttaattctagaatttaagcatcagtctgttcttataaaagttaggtttgaagtttataagaatrtaaaatcttaactcacatttgttgtttaatatttctgtcaaggaaaaaagcccccaaaaattgctatcactctataatcctaagtatttttcttttcaattttgtaagtaaaattatatgactatgttcatacttctctaattttttatataatatttttgttaattttactagtttgtgttttatgcctttagtcattaaaataaaatgcaaatgtgttaattcattgttgaaattgagcatgtattagtwaaaaatttccttttaggcatactttagtatactcctaacataccataacacattgggaaattgtcataaggcacacattttaaataacatcttgatataaattaacctgatagagcaaagtcttaataaagtacatacttgattttccttttgcctaaatcattacactgatgataacttgaatcattgtagtcaaatctaaaaacaccctttaataaataattgtgtttaacagtataattcctgtacatcagattgcagttagagattgtggtgaggcagaatttgagatggtagtaccgagaaaagttctgtttctttcttaaaagtcaactctatctttgcaccataaaaacataactatcgatatctataccccagaataatatttgtttgcaacaacttcttatgatgggtgtttaatactgttagtctgtaaattgaaactatttaaaactatatacatgccgggcgcagtggctcatgcctgtaatcccagcactttgggaggctgcggcaagtggattgcttgaggtcacttcaagaccagcctgaccaacatggcaaaaccctgtctctactaaatatacaaaaattcagcgggtgtggtggcgggcacctataatcccagctactcaggaggctgaggcaggagaattgctggaacctgggaggcggaggttgcagtgagccraggtcgcatctctgcactccagcctgggcaacagagcaggagtccatctcaaaaaaaaaaaaaaaaaaaaamcaaacctatatacacatactaggtaggatggtttatttttaagattaatattttatttccactccttttatgagccaatgaattattttatgtgagttcatgaggttttttaataaaataaatagaaattaaaagcttgtttttcatctgtatattcattattgttaatttcatgagaatgacatttgtttttattcttggaagtcttcaacaggaagaactatattttttcttttcactgtgctctgttacagggtgttttaaagtgatgtaccttgcagtgagcggagatcgcgccattgcactccagcccatctcaaaaaaaaaaaacagagtctgaaaagtcaatgtgtktagatctatgaaattrctttccacgtaatttgctaattgtaaaaaaaaaaattccagacttataaaacattaatggctaatcttttgggaaatgttaatcctagaattaaaataaggaacaatagatataaattggaagaagataatcagaattaaaattttctaaggtccttgtattcttaaggttcaaagtaaaaataaatgattaactgatgactgttaagaatgcttgtcaaaataaggtagccactaaaagaatagacaatagagtgtatacctttgaaggagataaaatgaattcaatctcaaggcaagaaatgaggaaaaggtaaatacaaaacataaaaaattgatgagaaataaatgcaaatatgtatataattagtgacaaaaagattaaaaagcaaacattgtcagttcaaatttttaaaaaatctagcactatactgtttccaaaagtcatattcaaaagacattaaaaggttgacagatgatggaaaagatacaatggcaaatattagccataagaaagttagtatatctatattataataaaacatttaaggcaaaaagtgactactagattataaagggggaccctgctaaaaaaagatttgattgatcaggaagatacatcaattctaagccaattatacctaataacgtagcattaaaatatatgaagcgatatttgagagaagagacttctggttctaaacaaatggagcatacatattttttcttattcttcccactaagtacagctaaaaactctggaaataattcttaaacattagagaagagaaaaagactagctagggactttggtacttgaagaatgttatggtgtgaaaggagtggaaataaaatattaatctgaaaaatatacaacatgttacattgtgtatatagtcttaaaatggtttatagactatcataaactgatacatacaaatatgattgtgggatatagacattaataatcctttttctatggtgcatagagttaatttttaagaaaaaaacgacttttcataatactccagcctcaaattttgcctcaccagaatcagtgtgttttcaagaactggaactttctcaggttgttttcattttttaaaatgatcractttactatttgattacatttattatggaaaatgtaaatatgcagargaatgctaaaatagaaagtacccattatcccatcatcccccaaacaacaaaagataatgtgtattcatttctagtccttttatgtggatatatagaattttaaaaacaaaatactgtaaaattatatcctgatttttcacattttggagtaaccatttcttgaggacaatattctttgaaaacatgatcttcagtttcattgtttacatcagagtctaattatagctgtaccatactttacctccaaatatttggtatttcagattgttttaaatttttgctattgtaaatttgtatgaatataatttttatacataactgtattgctgataatttgtttaagataaattatgggaacagagttaccaattcaaagagtatagctatttttaaatttttgatacattttactaaattacagaaagattgtacttatttatagtcataccaatgaatgtcccggaaatgtccatttttttcatatcccttgcccaaagagaatggtggaggttacctctcaaacttttattattacaaattttaatagaggtaaaatattacctccttatcttaattttgcactttttctctgataattaatgaagtatgatctttttccatatgtttacagctgatttgctttgcttttctgtatattttaagcagcgtaggtcttgtaggagcttccaatgtaagccattacttgtcatatcattagttcttcctaaatgagcaagacatgaaactacatgtatttatcacattatttcaagttaagtatcccaatgtgactgaaattataatcttttctcctgggcagccatgttattttaatgtcttgtaatctaacaaaattggctcttattcttcacgtaataaagaggttttgaatattccatgaaccctatatgtgatatgataagtgaagagtaagtttaagatcttatttgcattttctgtcagggtcttcaaaactctattaactgcatattcatgctccttgtagcaatcactgtctgtagccatggcaatgctggtatagtaaattccagcttattacctctagaattccacctctggaattgtagtcgtataatatccaccccttcagtatagaacaagaatatttctgctcaggagctaaaacagaggcctacatttgtgtccgttgtcccctttgagtgacatcacagtcctagcttcttggcagttgcagagaacctctttagtttgggggcagcttggtttaggctttggaatatggcacaggaatgactcctgwcatagaagatctgagaacttgtgattgtcctgtcaatgaagtgatcaataatgatatcaccaggctgaaatttcttcttttacatatgtataggaatctcctccttcaaagcccagatgtttgcttgggtggtgaccaagagactacacctggctggccaactacaggggatttagttgatagaggggttggctggctgtggtctgatccatctgtgcattttctctgagaatggtcttcccatgggccgctcccagtcagtgactaagycctgcagggataggtctgttcctgagagttgttggactctgacatctgactttggctcaagaactccccagtggccttgccaaaatttctggagagtgaaaggcagtataggatgctttcaccaactcttccttccctctctctttcactcrggatcaaacttgtatgactgactggtggccctctcaaccttacctagctacctccattttctctctcaggtgtttctcctaataaaatctttgatcatttaatcctttcttggcatctgcttctcagagaaaccagactaatgcaagttagtagttgacttcgaaaaacaaaatggttttctgcctcgcatactttgcaagaagaatgtaatcaacattttatattttctctaaaattaaggcactggatagcttgccatatggatggccacatatttttcagttctttctctaacgtttctggatcatccaggcccattctaccaattattttaatccagggtcatggwaagtaacatctaagttacatacaagagacaggagagggtctttaccatgcatatggaggctgacactgggagaaggctgtggtcagagcacagggaaaaatgtgcaaaaaagtagacagcagttcaaaatgcagtgtggaggtgagaaaggcagagtctaaaggagcaagcttcttatgccctggaatagttggattgtttkattgtattcaaattcattttttaattttgacagtgtgatgttttgatacatgtcatgtatacaccgtgtaatgatcaagacaggataattagtatacttatccctcagatacttattgattctttgtggtgagaacattmaawatcctctcttctagttattttgaaatatacaatccattatttgttaactgtartcatcatactgtgcaataattagaacttctaactgtaactttgtacattaaccaacctctccccattttcccatcttccctactgtccctagcttctggtgacccactattctactcttttttttttttcttttttgagatggagtctcacactgtctccgtcaggagtgcagtggcgcgatcctggctcactgcaacctctgcctccagggttcaagtrattctcctgcctcagcctctcgagtagctgggattacaggtgcccgycatcacgcccagctaattttgtatttttagcagagacggggtttcaccrtgttagccaggctggtctcaaactcctgacctcaggtatctgcctgccttggcctctcaaagtgttgggattacaggggtgggcaccgtgccccacctactattctactctttatgagatcaacttttttagattccatatatgaatgagatcatgtagtatcaaattcatcattttaaatattcttctgtrtcatcaatttttaaaatattttcccacaatacttttgctcaccatccactttttgtaccccagaccgtccatctgagatcttttttttttccttcctgaactatatttgttttttgttttcttgagagtcccagcctctggagtagctgggactacagggaagtgccaccatgcctggctaattttttaggcatttttgtagaggcaaggtctcactatgttgcccaagctggtytcgaactcctggactcaagcagtactcctacctcagcctcccatagtgctgggactacaggcgtgagccactgtgtctggcctgaactatattctttggaagttcattgagaaagggtatatacctaaaggattataaaacatgctgctataaagacayatgcacacgtatgtttatcrcggcactattcacaatagcaaagacttggaaccaacccaaatgtccaacaaygatagactggattaagaaaatgtggcacatatacagcatggaatactatgcagccataaaaaatgatgagttcatgtcctttgtagggacatgaatgaagctggaaactatcattctcagcaaactatcgcaaggacaaaaaaccaaacacagcatgttcttactcataggtgggaattgaacaatgagaacacatggacacaggaaggggaacatcacacacmggggcctgttgtggggtggggggagggggagagggatagcattaggagatatacctaatgttaaacgacgagttaatgggtgcagcacaccaacatggcacatgtatacatatgtaacaaacctgcatattgtgcacacgtaccctaaaacttaaagtataataaaaaaaaagactattttcacagttaaattgaaccaggtttgaagtggagattatctgaaattgttgttatttaacccactaattgagcaaaactgttggtaatggaattgtaattttacaattgttttctcccaaataatactaaatagagtacttccttggtgtttagatttcactgttgctcatgaaaaaatatgcaaccagtatgatggtgttcctccttagaggatttatctttttatttctggcagctttgctgatacttttttttttttttttttttgagatagagtctcgcaatggtgcaatcttggctcaccacaacctctgcctcctgggttgaagcaactctcctgcctcagcctcccgagtaactgggattacagacatgtgccaccacgcctggctaattttgttttttaggagagatggggtttctccatgttggycaggctggtctcaaactccagacctcaggtgatctgcccacctgggcctccgaaagtgctgggattacaggcatgagccaccatgcccagccgctttgctgattttttaacttgtctttgatactcttcactttttttaaaattgggatatatttaggtgtggatttatttatcatacttaggagtc

SEQ ID NO: 1587 - DNA, 43922 bp, Homo sapiens
gatagtaatactgatctttcagggtcttgggagaattcaatgctataggttacacgaacccacttggcatctgctgggcatgcatccatagagtattggcttttagaggcctccagagcaggaagggtagtccactgggtgggcttccatgaagattgaatgtccttccagcacagacagcttttccgtagctgttttcttcaycatgatgtgaacagaggaatcacagattcctgggcaaggcagaaaaaggggctctccaggatgaagatccctgctggggcaggaatctcatgtgtcccatgatgttgaaataatgacccyttgccaaaaaacaaaaaaaaaacaaaaccctagactaattaacagacagacaaaattcctcaaggcttggggtcctgtctggttctatctcccttccctatctctaccctcagcttggttcagattcctagaagtcaggggatcacactgggcaggctaggaaatgaacaatgttgcagcagaaagggtggcagggagctgcacttcctgaaacagatccatggtgaggactgtggaactcagctggggaggcttcttgacaatccgaagggtaccctctagctaagatggcactccaagagtagccttgaggtacccaatctgctccactgttaggagaaacaatgggtgaaatattaaaacaagtattgaaatagaaaagtataaagatgtagccagattttttaaatagtatgagtatctccaataaaccagaagtggagcagaagcataagaatgtgtgaggcaggcaagagatcctgtagccagagtcctaagaggatcccagaaaggcctgracatagcaggagaggctccatggaggagtatggacttgggagaaggctccatcttgatgggcccatggggatctactcctggctggttgctactccagcaggcttggttttatgaatttggggagaaatgggtctttactttcaaggtggccctgaggccccaggaactgaggacctcagagctagaggaaaccctgaagagcttctctctggggcaaggacagaaggtggggtgaagggtaggaagaggaagcacacagccctccccactctcaagtcttctcatctttccctggaaaatctgattaggtagttctgcatgggacctggaaatttgcattttaatgagagcccaattacgcttggtaagttccatacttctttaggctgcctctctgtgttttaccaactatgagtctctacaaaagtccctgggtgtggatgagccaatagtgcctggtcctcaggattcccaacatccctcccactttctccttcccatgcaatctgctacctctctattacttactgatcatagtcccgactctggaggatgcctcacaaagtccagactgtctaatcagggagaccgacatataagaagataaactgccctggtttgctccaggtgtttgtaaagggaggggcagactttctgtgggatctagagaagactttgtgcagtgggtgattttgagctggagctggcaggatgggaaggagtgtgtcaggcaaagagaatgagataggtagtccaagccaactgagatatgtgtgtaatcatagagagtagaggaagaaacagcagggtggcattcatttcaacttattgtattttgatttttatttaggtatagttcacataaagtacacaaatatttctgcccactatttcttcaaawttttctgttctccactgtccctcacttttttttgcctaggactccaattacacatatgttagaccattgatgttgtcccacaagtcactgggacttgtyytttattattattattttccagcttgctgtcttcagtttgartagttcctattgatatgttttcaagatcacagatcttttcttctatagtactaaatttgctgttaaacccagccrgtgaatttttcatttcagatattaagtttttcatctctagaagtttgatttttcccacattacagtaacatttttattatttaagcatattttaagtaactgttttaaagtccttgtctacaaattccttaatctctattatgtctgagcctgtttatattgcttaatttttcttctggtcatgggtcacattttcctagtcctagaaggtctagcaatttttaattggatgctggacatcataatattacaattttgttgtcttcctttacagtgtttgacatttgttttaacaggcaatacgtwacttacagatctgtttgagcttgtcaaggcatgtttttaaactttgttagggtgggtctagtgcagctttaattcaaagttagtttagccctaatgccaagatgtgacacttctgggtctctactgaatgttccaggtctctccactttgggtgcataaccttaatatatcctatgctttgtgaactctggaaattattttgcttataccttcmcagtaggtttattttttcgtgtgtgtgtgtgtgtgtgtgtgtgtgtgtgtgtgtgtgtggaccagccatgtggaatttcactttatgcatgcagagcttagtacttagctttggacttaaagagacccctatgaacatttctaaagctctcctctagtacttcactgcacaaattatagcttcctcagttttctcaaactctaatgtctgtctcctaagctcagcaagcctcccatgccctccttgggttttcttccacacgtccagaaagtatccttaggcagaaaattgggacaattgtagagcttatctcattttttaccttccctgcctgttctctaatgtctgaattgttatatgtatttttcgagtatctcaatagtgtcataaattttgtctagttttctgtttacaacagtttgcaaccaatatcagttactttgttttggccaaaagtgtaagtcaactcaaactttacatatatacctgtgtaactttaccttaagtagctacaggactttccatcaccctgagttccccttgcttattaccagtcaggattactcttcaaagataaatggattatttcattttatttcaattcatttattcttttagcaaccacttactgaaccrwgagtattggccaaagagtgggtgcacaagtagacaaaattaaggtagacaggatccctgattcatgaattgttcagtcacacaaataaatgtgaaactatgacagtgataagtgtttcactgagaagttgatggtactataaaaatagctgctgggagaaagttttcttatttcagtggtcaaagagagtttccttgaggaaatcacayaaactagggcctaaataatgaataaaaattaattaggggaaaagtcagatgaagagagttggaaggatattccaggagtaggaaacaacaaatatcacatgtgagcataaaaaaaaaatcagcagaatgggctaacatggatgtcaagggcaaggggcttcatgatctgtgatgaacttagaggagccygcagaggccaggcaatgcaagttaagacttcagtgtttactttgggaaacgggaggcaattgagacattttaaatactaagtgacacagtcaggtttgagttttaaaagactattctagctgtcatgtgcagagtgaattggaggagcaggacagggtatgcagagagagctgttaggaagctctgtggtagcccaggcaagacacaatgacagcccaactrgcctgctagagtggaggcagagaaaagtggatggacttgagcaacattcaggaggtaaagttgacaaaactgggcataagttgacatgaagaagaaggaagtgcaaggatgcccctcctaggctcaactaaccaggtgaatggtggacccagtgacagaaatgttgaaaagaggtttcggttgtggctgttgctgggagatggttcttgggaaggagtctgagttcactgtggttcatattgcatgtaaggtttatttgcaacatcaggaggagatatcaagtaggaagttagacatgtagagatcagaggaaaggattgagctggagaataaaaataatatatcatttgcatgtctagctggagaataaaaataatatatcatttgcatgtcttagtaatgaagtcatgggtgtcgtggcatgagatcagctggagggagaggagagattaaagtgaggagagagctacaaccaagtaagcaagtgtcagggctcaccaaccatgcaaggacagggcaggagaagaggaacctgcaaaggtgggtaaggaggaggtgcagagagatcgggaatgtggtgtcactgagccagagggaaggactggatcagagcatggtcttcagtgtcaaatgcagctgggaagtcaaataagatgagaacctagacacattagttggcttttagtagcatctgggtcacatttttgtggatacagaagccaggctggagtggaccagtgagtgagttggaggtaaggccacagagaccatgaatacacagctcttgaaaatttgggccacaaggggaggagtattgaaatagggcagctgctagaagcaaatgagagggtgaaaggagtgtttttgttgttgtgtcgttgttggtttctttgtcttaacgagcaagacttgaacagtttccaaactaacagcaaggatcagcttgagagggagtgtttaagtgcagaaaagagaggtggaagggtcctgagatggagagaagagatactttctaaggcccaggaagggggactggacctcaaaggagggccgatcctctgctttattggtggagtggaggtgtaggggagagagaggggcgactgggaaagtagggataggcagagaggatgccctttgagggaagttgagacaattccttttcataggatctctcttttatgtgagataggaggcaaggttgtctgctcagtgtgtgtgtgtgtgtgtgtgtgtgtatgtgtgtgtgtgtgtgcacatgtaggcacacatgcatatgtagcacacatgtagcagggtgggcatccattccaccctggaataaaaaggttaaggacatggaaaaggtgaagcttttccctgaaaatgggagagtgagctgatgagttacatgttgccgggtggataaaggctggtggttgggaacccacagtggacgaggctgccttgcagaacccctcttccagcagcacttggcagggaaggagcagacaggtaggttctaccacacatggagccttgccacagggctgggacatgaagacacaggcctgggggtgaagcacagtagattaaaatgaagcccttgacacccaagctggataaagaggcaaacgaagataggggatggggtggaattgaggaatgcaaacagctgggtcctcaaagatgcagctggggaggtgagtcagggcccaataaataaagctcttgaatgtcaggggcttgagcattttttctgagctcaatggggagccattgaggaattcgaggtgaggtgagtgatacaccagatcagcatctggaaaggtcaccctgtctgcagggtggaggagcgcttggagatgggagtgagtgagagacaatggaaggtggaatgcaggctgtggtagctgggagggagaggtccagaagaggcaagccctggggacggcagagtgtccctgtcaccccaacgagcagtgccccctggccgaacgctcacataaacccgggccacagccaaaagaggggcaagggccttggcagggctgggagagagaaggggtggccacaggaggacaggagttcagggtggggagaagcaaagtggggagtgtggtggattttaagagctgactgaatgagctttggccacggttttcccccaagagagcaatgacctgggggccctcagacatagatcccagactcagaagagagggccttttgagaccacctcttcctgaagtcttgtgaaaagcagagacttacctgaagtcacatggaggccagtaccatcgatgactcrggacayttactagccaactccccgacttcaggtgggtctcccytactcaacccaagcccaaaagaarcaagacttggggcgtggaggccrcgtctaataggccacctctgctgatgggaatgcrgattctttaggaggcacaacccagcrtcagtgggggccccctgagagccacctrccccactgccagcctccacagaaaggggcacagacccctggtgcttgtggcatcctggcgcctggcagcacccgcttcccctccatgtggctgatgtcctcttccttcaacctggtctcctctcccatggtcatgaatagccagggacaatcctattccttcaccctgattccaagggagggamacaaaatcataagagccacaagagagatgcagctttggtctcctgcccaccatgggctggatgccgcactgggcgttctgcagacgttgtctcgcccttcctcagaactgccctccttacagatcagggttgacgcaattcagaagatgaagcaattcgaggacaatgctgttctctaaacagaaagtactgctctgaggttaggaggggaaccatgatcttgcttaggctctgacttctgagtggccgtcaagatcaagtgctgccacttcaccattgaggctagagggcctgcagaccccaagttaacacagtagaccccagcttgtcacagggaagcctgcagatgccacactcttacacggcgtcctgaagagccccagtctgtcacagagctcatcaaataagagaaactcagggtttcagtcttatattccaggaggcctccttcatttcacctccctggttttttgttgttgttgctttttttttttttttttttttgagamagagtttcactcttgttgcccaggctggagtgcaatggcctgatctcgactcactgcaacttccgcctcccgggttcaagtgattctcctgtctcagcctccggagtagctgggactagaggtgcccgccaccaagcctggctaacttttgcatttttagtagagatggggttttgccacrttggccaggctggtctggaactcctgatctcaggtgatccacctgcctcgaaagtgctaggattacaggcgtgagccaccgcgcccagccaccaccccagttctgaggctggtgtwaatgcttctccatctcagggcagcmcaccaagtgtctactgagcccatacattgggcacttttccgtgctggtgggggaagggggaaggaggacaggaagcaggtgtgtagagcaatgaggaacacagacaggtgcagggatagtcttgagaattctctgctgctgaggttctctgcagccatcccccagtgggttccagggcacagaaccaagtccgcacatccctgcatggggccccctctctcggcagctggtctctcctgctccccagcccttcctgccggcttctgtggtgctgaaatctgtgtcagaaccttttctgttcctcaaagctgcctggctctggttccctctgggcccttgcacaggtggtcctcccagcctgaatctctctcttctctgcttttcccttttaccttgctaacatttttcaagtttcaatcagctgccacttccactggaagcctttcttgttatggaataggtgttcccaatgcctgtacttactcatcacacacacacacttcttgtgtctagtggtgtttgctaattgtctgtcttcccagtgggctccttaagaacaaggaccctgtctctctgtccctcattgtagccccaacacctcctatagtacctgcataataagcgtacatgttcaacccaatggaccaaatgcataaattacacattcaaagaacctagagattatctaaaggcaygcgtgtggtcagtgataatccatttggtaatagaagtcgagtaaatttcagaagtgccagaagagagaagggagagagtgatgaagtcacaacaggagaggggagccagggagggcctctcaagccggtaatagctaagtagagtcttccagagtgagaaacaagggcttttccattagcaaaggaaggtggcatccaggaggggcatttgtagcagagtatgctatgcctgagcaaggggtaggtgagtgggaagagaagggagggaggtggaccctgggctgttgctaytggtgttgactgcagaggctgcagataaattcactggccagcagtggggccgaagagaggggaagcagtcaactctcaaggccacatgtcatagggttcccagagaactctttaagagccaggaccctggctatctgtcccccattgtagccccaacacttctatctcccagtagatcgtctctgtgcagagtcaaattggtgaagtttcttaagaaaaacgttttgaggaagcatgaccagaggagggagatgagtccagaagccttcaggattgtccaggggagagataaggagggtttggaccaagggaaaagcaaagagatggagagaagctggggcttgcgatgtctcggggaggaagaacgatgtggggaaggagggtggcygaagagtgcagagtggccatcagtctcctgacttggaagatggcagcatgggtaaaatggccttcttggagaaagggagagatggggcactcagggtgggggcagctctggaggtcagttcagaacaggttggcaaagagtccagtaggtggatggatggatgcraatgtaacttagaaagaaaattccactttagtcaaacaggcaaatacaaaactacacaacagaaatcgccaatcacataagtggaaatggagagaaatgaacagktttgcaaaagaattactcattcagtaaaagggttctttataaagttccatctaagttaaattatatctggtataataaaatgtgattcatttacatatttcatttccacagagaaattgttgggaatgtggctgtcacattatgcttggtctgacatagacaagtgactatgtgtggcaatatttttgtcgcttttggcaaaggttctcttatcttttccttctccatttctggcaaaataattgttcacttattgactgaattcttgttccagtgggtaaagtctttccttcacaatcaggagtaacacttcatgccggtgctcctaggagaagagttggtggcagccattcacactgtagtataaatgactaaagagcaaagtctgatgaagggcaagggggattatgaaggcactgtgcttgtgaaaaggatgatggggggaaggacatccaggtcatgggggggaaattataaaatttgtgagragagaaaagccttcagacggatgtgacctattggagcacacacctgctttgctttcccctctggctgagcacagacctcccctggccttgcattggattcatacaccttccttctctaaaatgaccacttactgttgtatctcagggtcaaygcacagggttggagctcctctgtaaagttgtgttaaaggaaatgaaatctttctgatgaaactgaacaggtgagggtgctgtaggcagggctggggagacctgtgagcagtacttgatagagttgctccaatcaaattctctctgacttcaacaaaacaacagtaaaagtaatgtattcagcgctcaccatgtgctgggtccygtgctgcacaatttgtgccttatcacactcagtcctctgaacaactctgtaaggtaactatctctgttttacaaaggcraaacagagaagtccagagaggttacttgtccaccacgaatgtcagggttagattcaagcccagccctgttggggtttgaaattgctatcaggtcatttagtctgaagtctccttggggccaaagccatgtcagctgaggcttgaaggggaagcagacasatgtgactagaactgcarctcatcagcaactgactgccagtgctcagggcacctgamggagcacagcaaaaaggacagccttttgctccaggtttccactttttgagagatatgaacacattagtaaaatgcctgtgtctgggaacaggcagccagggtgagaaaataatcagatctacacaaaatggataaagaatgtgtggagggacctccaaagggtgagaaaccacttctggctgctaatgcaatctgggttcacatactcaattcttaaaaaataagtccatgaagcagaaacatcaaaaagcatgggatttggaatttgagacctgactttgaagcccacacagaacacagacaagtcaaycatgctatttggggtaagttgcacagactctctgtggcctgtttactcatttgcaagtaaaacagcaataataagatctacatcawgggaatattgtgaggctcagagattatgtgagagagctctgctaactggcctatctgtcctcattctgctgctgatggcgtgggggtgttaaagggtctctgattcagggcctggaccctcagtttaccmcctcaatggttcttacttctcttgcagacatattttgttccaaaatggcatcttacctttatggagtactctttgctgttggcctctgtgctccaatctactgtgtgtccccggycaatgcccccagtgcatacccccgcccttcctccacaaagagcayccctgcctcacaggtgtattccctcaacaccgactttgccttccgcctataccgcaggctggttttggagaccccgrgtcagaacatcttcttctcccctgtgagtgtctccacttccctggccatgctctcccttggggcccactcagtcaccaagaccsagattctccagggcctgggcttcaacctcacacacacaccagagtctgccatccaccagggcttccagcacctggttcactcactgactgttcycagcaaagacctgaccttgaagatgggaagtgccctcttcgtcmagaaggagctgcagctgcaggcaaatttcttgggcaatgtcaagaggctgtatgaagcagaagtcttttctacagatttctccaacccctccattgcccaggcraggatcaacagccatgtgaaaaagaagacccaagggaaggttgtagacataatccaaggccttgaccttctgacggccatggttctggtgaaycacattttctttaaaggtaaggatttgagaagttgatttttatttatttattttatgatgatgatgatgatttttgcttagtgaaatacacaagccagacaaaccctagactgcagggtggagaaatgggagggcctgagctctaattagctttgcaattagctggctgcaggacctaggatagctcatgtttaccagttacagtagggactcatttagttctctttgggtagacagattaagtgtcttgaggtgtgtttacatttgactcagtgggaaacccacaggaaaaatctggagactacttgagagaaaagatctcttgccaccagcagctgtcccactgccccttgaaagttttagaaagaaacatggaactctctgacaacccagtttaagaagcaaatccaagagtgtgaacactttcataggtgtagaaatgtagacaagctgatgtrcctgtcattcgtatcccttatatatatgaagtctccttcatatataactgcatatagatatagatatagatgtagatatatgttagagctttacagtttcactgtattgcagggaatgcacatcagctttaaagtcaaacaacttgaatttgaatttcacctctaccccatacttgctctatgatcctcagcatgtgtctctaaaagatttaccatgtgttgagtgcctgacctgtgccagtctctrtgctgactggatactctgatgataaagccaactttataggttgtgcttgagatagaagtgcctggcatctccaggcagagttttcatggatgccaccgtatcatccctcccttcctctgtccctctccttcccttccttcctccctcccttcatccacatgttcactcatttatccatgcactagtttatctgtccatccatccaggcatgcgcctaaccaaccagccagccatctatccattaacgtattcatctatccatctacccattcaccaagctatccatccatttgtccatccatcagttcatccatccatccatgcatccattcatccacctagctagccaaccacctgtccattaatctattcatgtatctatccaccctatatctgcccattcaccaaactatccacccatttatccatctgtcattcatccatgaatccatgcatacatccatctatccacccagacagccaaccatttatccattaacctgttcatccctccacccttcatctacccatccagcaaactatccacccatttatccatccatcagttcatccatctatccatccatccatccatccatccatccatgcrtccattcatccacctagctagccatctagctagccaaccacctatccactaatctattcatctatctatctctctatcggttcatccatccatccattcatccattaatccatctatccacccagccagccaaccatttatccattagctattcatctatccatccaccctccatctgccaggctatccacccatttatccatccatcctgcaaagaggaaagagaaggaaagaaaactggtatggtttgagcccttactaagttaccttcagtttatgttgttctatttaactaattctatttttaattgaaatayaattcacatgtcataaaattcaccattttattgctttttagtatattcacaagtttgggcaactactccgctgtgtaatatcagagcatttttttgtcacctcaaaaagaaacctcatacccactagaagtaattccccatttcagtttgctgtctttgcctcactaattgtactttgacataaagacttcttttctctctttgtgctagccaagtgggaraagccctttcaccytgaatatacaagaaagaacttcccattcctggtgggcgagcaggtcactgtgcawgtccccatgatgcaccagaaagagcagttcgcttttggggtggatacagagctgaactgctttgtgctgcagatggattacaagggagatgccgtggccttctttgtcctccctagcaagggcaagatgaggcaactggaacaggccttgtcagccagaacactgakaaagtggagccactcactccagaaaaggtgggcatctgtgtcaatctcctgggccctgaggcaggggatgcacacattcaaaratgagggagagawtgtgctaacagctgttggataatcacttctgcacagtgagcaccaactgyatgcaggacagagagcctggggctgtctatacatgttcacacttgaagttcactatcacctgatgaggagtcttagtaccactcattacacagatgaggaaatggaggctccaaggggtaagtgaattgcccaaggtcatgtagctgttatatgcttgcagagctggctctagaagcctatctgatattgaaatctatggaatgatcccataaaagctagcaaacaaaagcattggtggtcacatataagaaagaggataacaatattaccaaatccaaaggttggtgaaaaggtaaagtaacctgctacttacaaagtgcttagaagaattcctagaagatagtaagtgttcagtaaatgctagctaataatgttattattagttctgtaattagtatggtgagtayaaaaaatatggagaatagcaaaaagattaatcatgagataaaaaaggaatgtccamgttttatgttctgtctcttagcaatatatttttggcatcttagaatgattttagcagcgttccctggtgctcatagtctgggaagagagaaggaaggctgcagtgtaactggaattcaagaaagagattgrgcaatgccccacgggagggcaggaaaggtgctgaggagtttctgagcagagagagatcactttcagctgggactgagggacagcttcaaggaggcggtggggtttagctgcacatgtgggtagcatatgagcacacagaggcttggcaagggcagctttggtagaggacacagcactggcaaaaactcaaagttaaggatgaagagatgctgcagggtgtgtcagcgatttcttctcttctcaggctgcatctggggctggggataggaagaggaggtggcacagaatttcagggagggagggacagagtacagagcagcagatggagcacagagaaaacagggaaagaggacagtggcagggaaaagagagctgtccctggcatgaggggtcacaagacacctgtcagatgaggactgaaatgtgtccatccaatatttttgtgctttcgttgctgtragtcactaagtacataaccttgggcaaagcactaaaagtaagctttaccgtctttaaaagggggaagtgttgttgaatgtgcctgggacaatgtctggcatataataaatgttcaggctggactcacgcctgtaatcctagcactttgggaagccgaggcgggtggattgcctgagctcaggagttcaagaccagcctgggcaacacggtgaaaccctgtctctactaaaatacaaaaaaattagccgggcatggccacgtacacctgtaatcccagctacttgggaggctgaggcaggagaaacacttgaacccacggggtggaggttgcagtgagcagagactgtgccattgcactccagcctgagcgacagagtgagactccatcttaaaaaaaagaagttcaacacatgtgggctgtttactcttggttcagggaaaccattgcagaggaaaaaaaatattgtgctaaattatcaggtggtgctgttcaatatagtagccgctaagccacctgcagtaatttacacttaagttaactgaaatgtagtaaaattaacattttagtttctcatttgcacaagccactgtttaagttgctcagtagccacacatggctaatggctaccgtactggagagtgcaggtctaggatcttcccagcatcacaggaagttctgctggactttgctgctctagggcattattagcagggcttgcatcaggaagtgctgctgaggaggtattccggacagtgagtgggtggttgatgagcttccattgctactggacgtctcctgttggtttctgccatagactcccttgctgactgctttttcacctctgcacccacttcactgggggctcgtctatctccttgcatgtttttagtgctggacctgctcagctgggaggcttatttcaagagcaacctgggtttcttggctaggatgtgttgacctttttagcagaaattagcagtggttggaggaagaacggagtctcccaaaatggcatctaggagcagagatgcagacaccatgggcttgtgacctcattgtttccttttccctactccacaggtggatagaggtgttcatccccagattttccatttctgcctcctacaatctggaaaccatcctcccgaagatgggcatccaaaatgyctttgacaaaaatgctgatttttctggaattgcaaagagagactccctgcaggtttctaaagtgagttgaatgaaaatatttgcaaaamagtccaagctggaagcacctgcagaattaatmacaygctcttatttcgttgataaggaarcagaggcctgaaaggtgaagtcagggtcttctgcggccagaagaaccgaatcttgcggcctatggccaccatccctctggcatgcagcattgttatccctcttcacacaaatgttccgaagccatcctcagcagtcaggtgctcccccatgcctgctgcaggagagcaagtgctccctcaggatctgacctcactttcttcctccctgaagtttaggccctcacacargcatcacagtgtggctgcccataggtcatctgcaccctgtagatgtgttgtctggccttcagtgtgtaaggagagagagagggagagagagagagagagagagagagagagaggagttttaaagcatagtatattagatctaaaagtctagatttctgatcctcttgaaataaatcactaactctaattcccacatggcaacagtgagcctatgtgtccacatggcagccatcacaggagctgagctatgagtgccccttttaaccagacagtatcctccaggtaatgtgggcaccccatgctcttacaagaagtctccgtcagttaattggggttacctgcctagcccctgcacacatatgggttactgatccctgacctaaaattttattttgatagtggattataatagaagtgatcctggggccactgaaggggacctttgtcattggttttcagaaaatgttgagaggccccactggaatatgatgaacataatggacattttctygaggaaagtgtatctgtgagcctatgaaaaataatgcctgtagtcacaggagctcaagcctccctgaagcttagaaatccaggaactccaggttaagaatctcttccctagaagacaaagaagggatctaaccttagtcatatcaaacccatgtctgccatgcaagaactgcagcaattactactgctggcaagtccacaagcacttgctttgtatgatctctcttaatttacacaataaccttacggggcatatgcagttattattaccttttatagatcgggaacctgaagcacgcagcaycttaataattttgcaaccataagtggcagaactgagactcactccggtcttcctgctctgtgtttgtaaccatctcaatcccggtgtaaggaccaatgggccatagtcaacacccactgcaatgtattgagtaaacccaatgccaggcatttgaaccttgaatcctttcaaggtagacatcaccattccagggcaaaarcactcagtttagtttactcagttaagtaaaagtgtctccactagggcyactgatgtttgtttttcccttggcaggcaacccacaaggctgtgctggatgtcagtgaagagggcactgaggccacagcagctaccaccaccaagttcatagtccgatcgaaggatggyccctcttacttcactgtctccttcaataggaccttcctgatgatgattacaaataaagccacagacggtattctctttctagggaaagtggaaaatcccactaaatcctaggtgggaaatggcctgttaactgatggcacattgctaatgcacaagaaataacaaaccacatcmctctttctgttctgagggtgcatttgaccccagtggagctggattcgctggcagggatgccacttccaaggctcaatcaccaaaccatcaacagggaccccagtcacaagccaamacccattaaccccagtcagtgcccttttccacaaattctcccaggtaactagcttcatgggatgttgctgggttaccatatttccattccttggggctcccargaatggaaatacgccaacccaggttaggcacctctattgcagaattacaataacacattcaataaaactaaaatatgaattcatctgtcaacagagtcctaatctgaaaatgatttactagcgaactcgcgatggctgggctgtcatcccatgacatctcagaggctgcatgatttttttccttcatttattcagcaaaaatttattgaacacttaacatatgttaggagtaaatcagacagacaagattcctggcctgttaggcctaaatgggggagacagacccccctacagcaacaatgaaaccagacctataaacatgatcgtaagagcttatgataagtgccatgaaggcattgaacaggatgactgagagtgaggataggacaagggaggggtgtgagcatgaaggctgtgagtcaggaatgagtggcatgttggagagacagagcagggaccttgtggcatcatgtgtggcagatggaagaaatgagaacacagaggctcaaagaggtcggctggtggaggccattgttagccaaggagagagtctgggtttgtggggagcgccgggacaccggctgacgagggctaatgcgtgggctgtgaaggtctccccgggtgcygtggaccagtttcccatctcctcgcggctggctgccttcctgactccgatracgtcatgtgtgcacacacagccctccgggtgctcagccccttccctgcgggtttgtaacggcaatggtcccgcttccatactctgagtcctgagagcagcacaatgagcaatgggccacggttgcactacagcaaaggcagctcgtgtcctttgagtcmgacccaccgtccctccttccctcgttgcctgacaggctgtgctggcacctctatgtcacccycattaccgagggcatctctggcagcctcagtagagcccttgctcccatcagatccaaaggmtcctcttctgggggccccggtgccccacacacctcggatgtgccagggrcctcatgtaggctttctcatgctattttataaggaaagaaacaaaacagaaaggagttatgctggagagctggcagaagtcccaggggaacctaaccccctggccctcacgctcccactttatttcacaaacagaacaagctgccactgcactccagcytgggcaacagagcaaggccctgtctcaaaacaacaaaaacaaacaaacaaacaaaaaasaaaaacagaagagctgacactcaaagagtaaaaacaactaacctaagccacagggccttcctgtgctgrcttagaacaaggaccaatggccagttatgaagggctcccgcaacgctgcctgaagcaaggtttgttttatacacaatgctcttccctcaggctctccattataaaggccacagtggagaagccaggcatccttcccaggaaggaacatacctgctcagacatggctccagcctcctgcagagtaggcaagaagatgtcctacagtagcacaaaggagatagtaggtgtgaagaagtgactaatgacacttgytgttcacaactagttttttccagaaactatgaggaaccccaagtagtcagcagtgggtgacggctgtcagcatccctccracagccttgcttccagtggcactttacagtgaaagcaagcttaggtggcaacctggtgcccactcagacttgcattggcaagcagatacaaaaacagccgtgggacattttctatcaacttgctgaggtcccagctctgttttttgaaatgccaatccttcgcatttgtttttaaatgtacctcacattttgttttgaaatcatttccactgggtatggtaaggtgacagacagagacatctgcctttgaaagaagagtttattactttgagcacccaagaggaaggggcctgccccaccacacagggccacacggggaagcaccggggctggtccagaggcacaggagcgagaggaacatgtggccagagactttagtactgcagtgtggggagtggttaggtgggacatccctattgggcaggaagtgaagtatagaggttgaggcttgtggttggagaatttgtaaaatgattcttgcatgcccatgaaaacacagagagggcatgaacataatcaactgtggccgttagtttgggccatcatttcaagatgcaaaatcatcagtcacagaatatcaagcatgagtattacagcatcgcatgaaagtttcactcaaggcaagagtggcaaatgcagacccatgggcacctgcacctccaccccatttagggaatcaggttcgacctcctaggagactttatgttttacaagtgccttgattggaaccactgtgccaacctcaatgaccttttattttaggatgagatttacttgtactattaaatcattctactttccaacaataatgttttattgtttttaattatgaataagatgcatgctctttgtaagaaatttggagaatacaaaaatctgcaaagaagaacttaaaagtcacttcaattttgtcatgaagagattctctcataaataaatactcatttaattctaagcktgttctacttacttgggagacatgggtgatcatgagccaatgatttcacttcacaggtttctcaaagtagtaagaagaaaggtctttctctgtttgtgaaatttccttccaattttcttttcgtcacctaagctggagtgcagtggcacaatcttggctcactgcaacctcttctgcttcccaggttcaagggattatccagcctcagcatcccaagtagctgaaattacaggcaccygccaccctgtcaggctaatttttatatttttagtagagacggggtttcaacatgttgtccaggctggtctagaactcctggcctcaagtgatccacctgccttggcctcccaaagtgctgggattacaggcatgagccaccgcacccagccccttccaatctttttattcatacacagatyatattttatttgaagcatcaacaaaatactggaatggtttggtgtggtagtgaaggcttggactgggggataggatccmagttctgagtgtggccccatccgtccacttaatgagcaagtgacttaacctcacagagcctcagtttcccatctacaaagtagggatgactgtgcctctctcacattcttgcggtgagggtgaccaataaagaacrtagcctaaaagaaaaaaaaaagagggggaaaagtggcagacggaaggcaagactagattgcagctcgcacttggacagagcactgtgtggacctttgaaaaaaatttcaaaggttcaacactcgcatcttcaccctttgcttcagaactaatgcaggaataaaccaggaaagccgagagaacccacaaaccctctgaaggaaggaggttgctcctgcagaacccaagagacagtccaaatattgtgagtgcccaagctgtgaaagtgggaaaggtggattktctgtcactgaacacacaccctcactggggcacctgaaggtctagatcatgggagaaggatctgaccttatctggagctgagtcaatttagagagccaagcaaaatataggggtagaggaagcagcaggaaaagcctgtgggttttccaccctcagaaagctatttcagagttgtctcatgggtgttcttggggagggctgccagaaatactgggaaaagaccacagggagaaggaaacccccagctgaaccttgtaacaattccaactgaacaggaagtctcctggccagaactcaagggagggcctgaatctggtgtgcagactccacaggcyrataggcgtgaaagccctacttgttctcataagtgggagkctggtagcctggggcaagttctcagcccttcctgcccactgcctataaacaaacttggtgctgtttggggggacatggtgggagtgagactggtcttttgggttgtgtgggagctgggtgaggcctgtaactgctggctttcccccacttccctgacaacttgcatgacacagcagargcagccataattctcctgggaacagctccattgacctgggaaccacacccccattccccacagcagacatagcaagccctgcccaaagagagtctgagctcagacacacacagccctgcccccctccccccatggtccttccctacccattctggtagctgaagacaaagggcatatactcttgagagttctaaggccctacccacagcctggttcttcctatactaccacaactgatgctctctcaaaaagtgtcaccttctggcaggaggccaaccagcacaaaaatagtgcattaacaacaaaaactaaggatcttcacagaatccatttcacccccctgccatctccaccagaacaggtgctggtatccatggctgagagacctgcagatggttcacaccacaggactctatgcagacaatccccagtaccagcccagagcctggtagacctgctgggtgactagatccagataacaatcaccacagtttggctctcaggaagccacatccctaggaaaggggtgagagtactacatcaagggagcaccccatgggacaaacgaatctgaacagcagccytgagccctagatcttccctctgacataggctatccaaatgagaaggaagcagaaaaacagtgctggtaacatgacaaaacaaggttctttaacaccctcaaaaaatcacactagctcaccaccaaacaaaaaagaaatccctgatttacctgaaaaagaattcagaaggtcagttattaagctaatcaaggagccaccagagaaaggtgaagtccaatttaaggaaataaaaaaaatacataagaaatgaggggagaaatctttagtgaaggaatagcataaataaaaatcaaccctttaggaaataaaggagagcactgagagaaatgcaaaatgttctggaaagtttcaggaatagaatcaaagaagcagaagaaagaacttcagagctcaaagacaaagttttcaaaggaacccaatccaacaaagacaaagaaaaaagaataagaaaaaaagaacaaagcctccgagaagtttgagattatgttaagtgacaaaacctaagaataattggcattcctgaggaagaagagaaatctaaaagtttggaaaacatatttgggggaataattgtggaaaagttccctggtcttgctagagacctagacatccaaatacaagatgctcaaagaacacctgggaaattcatcacaaaaagatcatcatctgggcacactgtcttcaggttatctaaagccaagatgaaggaaagaatcttaagagctgtgaggcaaaatagtcaggtaagatatacaggaaaacctgtcagattaacagcagatttctcagtagaaaccctacagaacagactagaagggattggggctctgtcttcaacctccttaaacaaaacaattatcggctaagaattttgtatccagtgaaactaagcttcatacatgaaggaargatacagtctttttcagacaaacaaatgctgaragaattcaccactaccaagccagcactacaagaactgctaaaaggagctctaaatcttgaaacaaatcctggaaacacataaaaacagaccctctttaaaacataaatcctacaggacctataaaacaaaaatacaattaaaaaagcaaggtatacaggcagcaaatagcatgatgaatggaatactacctcacatctcaatactaatgttgaatggaaatggcctaaatgctcagcttaaaagatgcrgaatggcagaatggataagaattcaccaaccaagtatctgctgccttcaagagactcacctagcacacaaggactcacataaatgtaaggtaaaggggtggaaatagacattctatgcaaatagacactaaaagcaaacagaagtggctatacttatatcagacaaaacaaacyttaaagcaacagcagttaaaaaagataaagagggacattatataatgataaaaggccttgtccaacacaaaaatattacagtcttaaatatatatgcacccaacactggagctcccaaatttataaaacaattactactagatctaagaaatgaggtagacagcaacacaataatagtgagggacttcaatattccactgacagcactacacaggtcaacaagacagaaagtcaacacagaaacaatgagtttaaaatatatcctggaacaaatggacttaacagatgtttacagaacattctacccaataaccacagaatatacattctatgcatcagcacatggaacattgtccaagataaaccatatgataggccacaaaacaagtatcaatgaatttaagaaaattgaaattatatcaattactttctcaaaccacagtggaatagaactggaaatcaactctaaaaggaaccttcaaaatcatgcaaatacatgaaaacaaaatgacctgctcctgaaggatcactgggtcaacaatgaaatcaagatggaaatttaaacattatttgaactgaactgtaatagtaacacaacttatcaaaacctctgggatacagcaaaggcagtgctaagaggaaagttcatgaccctaaatgcctacatcaaaaactctgaaagagcacaaataatctaaggtcacacctcaaggractagggaaacaaggacaaaccaaacaaaaacccagtagaaaaaaaaggaaataaccaagatcagagcagaactgaatgaaattgaaacaacaacaacaaaatagcaaaagataaatgaaacaaaaagctggttcttggaaaaaataaaaaaagaagaccaygagcaagattaaccaagaagagagaaaatccaaataagctcaattagaaatgaaatgaaagattttaaaaccracaccacagaaatacaaaagatcattcaaggctactattaacacctttatgtgcataaaytagaaaagctagaggagatggataatttcctggaaagatccaatcctcctagtttaaatcaggaaggattagataccctgaacagaccaataacaagcagtgagattgaaatggtaatttaaaaaattaccaaaaaaaaaaaaagtccaggaccagatggattcacagctgaattctaccagacatttaaggaaaaattggtaccaatcctgttgatactattcaacaagatagagaaagagggaatcctcactaaatcattctattaagccagtatcaccctaataccaaaaccaggaaaggacataacaacaacaacaacaaactacagaccaatatccctggtgaacatagatgcaaaaaatccttaacaaaatgctagctaacagaatccaacaacatattaaaaagataatccaatgatcaagtgggtttcataccaggcatgcagggatggttgtcaataaatgtaatacaccacataaagagagttaaaaacaaaaatcacatgatcatctcaatagatgcagaaaaagcatttgacaaaatccagcatcgctttatgattaaaaccctcagcaaaatcggcatataagggacacaccttaatgcaataaaaaccatctatgacaaacccacagctaacataatactgaatgggtraaagttgaaagcattccctctgagaactggaacamgacaagaatgcccactctcaccacttctattcaacatagtactggaagtcctcgcaggarcaatcagacaagagaaagaaataaagggcatccaaatcagtaaagagsaagtcaaactgtcactgtttgttgatgaaatgatcatatacctagaaaaccctaaagactcctccaaaaatctcctggaactgataaattaattcagcaaagtttcaggatacaaaattaatgtacacaaatcaataagtctgctatacaccaacagtgaccaagctggggatcaaatcaagaaatcaacctcttttacaatagatgcaaaaaaataaaatatttaggaatatacctaaccaaggaggttaaagatctctacaaagaaaactacaaaacattgctgaaaaactcatagatgacacaaataaatagaaacacatcccgtgctcatagatgggtaggatcaatattgtgaaaatgaccataccacaaaaagcaatctacaaattcagagccaattcccatcaaaatcccaccatcattcttcacagaactggaaaaaaaatgctaaaattcatacggaaccaaaaaggagcctgcatagccaaagccagactaaaatgaggcatcacattacctaayttcaaactatactataaggccataatcaccaaaacagcatggtactggtataaaaataggcacatagaccaatggaacagaatagagaacccagaaataaacccaaatacttacagcccagttatcgtagacaaagcaaacaaaaacacaaagtgaggaaaagacaccccattcaacaaatggtgctgagataattgggaagccacatgtaggagaatgaaactggattctcatctctcaccttatacaaaaatcaactcaagatggatcaaggacttaaatctaagactggaaactataaaaattctagaagataacattggaaaaatccttctagacgttggcttaggcaaggatttcatgatcaagaactcaaaagcaaatggaataaaaacaaaggtaaacaggtgggacttaattaagctctttagagcttttgcacagcataaggaacagtcagcagagtaatcagacaacccacatagtgggagaaaatcttcacaatctatacatctgacaaaggactaatatccagagatattccaacaaattagcaagaaaaaacaaacaatcccatcaaaaagtgggctaaagatatgaatagacagttctcaaaagaaaacatacaaatggccaacaaatataagaaaaaatgctcaacattactaatgatcagggaaatgcaaatcaaaaccacagtgtgatatcaccttactcctgcaagaatggccataatmaaaaaataatagacgttggcgtggatgtggtgaaaagggaacatttctgcactgctggtgggaatgtaaactagtacaacccctatggaaaacggtgtgcagattccttaaagaactaaaagtagaactaccatttcatccagcaatcccagtactgggtatctacccagaggaaagaagtcattgtatgaaaaagatacttgcacacacatgtttacagcagcacaatytgcagttgcaagattgtggaaccaacccaaatacccatcaatcaatgagtggataaaaaaactgtggtgtatatatatatatgatggaatactactcagccataaaaaggaacgaattarttgcattcacakcagcctgggtggaccttgagactattattctaagtgaagtaactcaggaatggaaaaccaaacatcrtatgttctcactcataagtggagctaagctatgaggatgggaagacatgagaatgatacaatggacttcggggactcgagagaaagagtgggagcggggtaagggatgaaagactacatattgggttcagtgtatactgcttgggtgatgagtgcatcaaaatcttgcaaattaccactaaggaacttactcatgtaaccaaataccacctgttcccccaaaacctatggaaataaaaaagttagaaaaaaaaagaatacagcctggatcatacaaccacagacacaggcaacagccacaaccacaccaccacctgctgccagcatcagaatattctcaaagcgagcctgggcttaagtcacaatccaccatttgtttgtgggacaggcagtcagggcagatactttgaaaaaaaagagcccttcctgtttgctgtgcattgtcttcataccagttcccagaattgacctgacaaatattgaccaggttgctgtsatcttcaaacaccattttcctgtgggtagaggtgatgcagtgctgaagacctgggcccctgctcagtgcctttgctctgtaagtactttgcctgtgcccaaaatgagggcaggggcagaaactgcctcactcccttctctctctctctctctgtctctgtgtgtgtgtgtgtgtgtgtgtgtgtgtgtgtgtgtgtgtgtgtgtgtgtgtgtgtgtgttcctggctttgatggtaaggatgggagaagtaagtccctgaagaagaaatgcaaccatgtactccctctgagtcttaaaggagagacttcaggttttcaatctccttttatggaaaacttcaagaattttgagagaagaatcccaaatattcctgccagttagacaagaaaatgaaacaatacaacccaaagcacaatgacaatgatgctgcagcamatttactagaagctgtcctgtgaaaagggtgcttaggagctctggtctggaatctgagtcttgctcctgctctcaccaggcggcttgtcctaaccctgcatcagtcattccctgtgtacagtagggctaataatccctgtgctttgaggttctcataaggattaaattaaataagacaaagcaagtgtttctcaacaagggcactaccggtatttgggcaggaccactcttcattgaatgtgactattctgggtgyttcaagagctttcgggagcccagctgttccccaactaaactccagcagcatccctccaccaggcattgagctgatccaaaatgtcacctctatctcctttacacacagccctccccctgcctttgtcaggagccagtgttacaatgcatgtaatatcctatcacttcataaacccttaataagtgagaatattatacttcacgaatatagttcttaattttcctctgggatctttctggaagaggaattaagaaatgaattgggcatcattaccccaggcttgatagaaagggaaaaaaactgccattgagtactttcggcatgcctggagctttgtacwttgactgtcatataatcccgaaatggccccacacccaggaggtgggcaatatcatttgcattttgcaaagggagacactgagtttcagacagctgcttttgcacagtatgaggcagtgagttactgcacagccttgattccaaggtcccctcatttacaattgaatcccctttgggaaataggtcatttgcaagtcagggagtccctggggtgcagtggagtagaaaatggtgctgagttcaatgggataaaaagaataaaccagaaatagtttcattacaggcacttcattttacccaggggtagaacaatttttaaattgatttgcatcttccaaattttcgatcaaaagaaaatctgaagtgtatggaagctgtcattaagtgaacccacattgggagttcactggggctgtcattaagtgaacccacactgtgctggagaaagggaggacgtagccttgggggcgtgcccacagtactttgaccagcaaacgcatttcaacatagcagataatgagaccacattcgtccctcctgacacctggcctttgtcgtttggcaggctacttagggcaccaggggctacaaacccatttgcaaaaatataatctctctttcactgtcgcagcatttgcaattgatccagaagtcattggtttaggcaaaaaattattaaaggtgccagttaagacacaaatgttatcaggacaaactgatgaggagtgatagaggtggtcagcagtgcacagctgctgcgcaatgaatggaacggtggaagagttggatttgaagggagaagagaaggctgccttccttactgagaaaatcaagatttgggagggtcccagtagcaatgtggtcatgagtcttctgcaagaacctgaagatgggtgtagggtcgggggatgggactgaaagggaaaggagagcatggaacattgggcagggtgagtagagacaaccctgtttgcactgcagttccccctccagctcaggctgcattcccagccctaaaacaaggggtcttcctgctcctgtaccactttgatccctggaagtgraataaaggctcttctggcacattttgtaacttaaaataaagcacaaragatatcacattagtttgcaagggctatcttaataaatactacatgccaggcagcttaaacaacagaaatttttgactcacagttctggaggttagaagtccaagatcaaggggttgacagggttggtgccttctgaggctgtgaaggagaatctgctccaggctcctttcctagctttgcctctctcctagtttgctggccatctttcgctttcctcggcttgtagaagcatcaccctgatctctgccttcatcttcacatggcattctccctgtgtgttgtctgtgtccaaattgctccttcttgtaaggacatcagtcatattggattaggagcctgctctaatgacctcatcttaactgattacatctccaatgaccctatttccaaacaagatcatatctggagatactaggtgtctagacttcagcatatgaatttcgggcaggtacaattcagcacgtaacagacatcatccccacagccctgaggcaataaaaaaaatagagaggtttcagcctctgcttgtgacaagaggcatcccagatatcagaggctggacagagacatggagacagagttgctctctctcatcgctcctctaggctccatcagycctgctactttgctccccactcctgggctgtcttcatccacacatccagatggccgatcctcacatcgccactccagctaatgaacgactggaaagggggagggcactcttctttctcttggggcctgaccgaggctttgcacatcatcctttcctttccaatgggcaggatcatagtcaatagccatgctggatgtgagggaggcctaatatcactggcagtgtggccaggacatttgctccaagcatgttcttctcaatttgtcatcacatatatagctattgagtgtcacctaagctagtgtcaattaaacccttaactctaggaaatctgaaattttgtttacttctttccccactaaatactgaggacctagctacctcttggaccaggcagatacttgaaagttaatgaatgattgaaagaatgactggagagaagaaagaaaagggaaggaaggaagaaggagggaaggaaggaaggaaggaaggaaagaaagaaagaaagagaaagagaaagaaagaaagaaaaagaaagaaagaaagaaamagamagaaagagaaagaaagacagacagaaagaaagaaagaaagaaagaaagaaagaaagaaagaaagaaagaaagaaagaaagaaagaaagaaagagggagggaggctagactatggaagttgttttgctgttgtggtggtggttgtttttaaaacaggttctcactctgtcatccaggctggagtgcagtggtacaatcacagctcactgcagcctagaccccccaggcccaagcgattctcccacctcagcgactacaggaacatgccaccacacccagctaatttttaaaaacattttgtagagggggtctccctatgttgcccagcctggtctcaaactcctgggctcaagcgatcmtcccacctcagcctcccaaactgctgagattataggtgtgagccaacatgcctggccaggagttgccattgttgttgttgttattgctattgttttatagtccagagacttttactcaacaaaatgttagaaacctactatatgtaaagcagataaagggttgctaccttcactgaagcctcggaggaaagtgtccagaatcctaatcatccacagccttgtcttcttcagtgyccctcatggcagccctgtggggcacattgtgaaggtgggatttgtggtatgagcaayagagaatcatgacattatttatggagaaaagtgacatgttcaccctcttgttttcagagaatgggtccagcttggctttggctactgggaacagggatcctggcctctgtccactgtcagccccttcttgcccatggagataaaagtctgcaggggcctcaaccccccaggcatcagctctcagagccagcccccgcctaccacagaatcacacccaccattaccaattttgctttgcgtttgtataaagagctggcagcagacgcccccggaaacatcttcttctcgccagtgagcatctccaccaccctggccctgctctctcttggggcccaagctaacacctcagctctgatcctggagggcctgggattcaacctcacagaaacccctgaagccgacatccaccagggcttccggagcctcctccacaccctkgccctgcccagccccaaactcgaactaaaagtaggaaactccctgttcctagacaagcgactaaagyctcggcagcactatttggacagcatcaaggagctttatggagcttttgctttttctgccaacttcacagattctgttacaactgggaggcagattaatgactatttgagaaggcaaacatacgggcaagtcgtggactgcctcccggagttcagccaggacacgttcatggttcttgccaattacatcttcttcaaaggtgaggcttgctcwgacagaattattgccactgcctctgcaagtaaatgctcttacagcagagagccagctaataggttctttgctaaccacttggggaaatctatgaataagatagagctttcccacmcttgcgtagccacagtccatgtgggttggaaataagtgcagaaaataactcagtgggatggtgatgctgtccttgcataggcattgggtgccacagagttcccaaaagagacacccatccagacttgagaagcttcctggtaaaacagccacccaagctaagacatgagagtgagtagtatccactcaggtgaagaagcttgggagaggtggggcaaagagggttcaggttgaaaaaacyagcatatctaaaggtccagggaaaagagatatcattgcattttcaaagaactgaaacaaatttagttgggatagaacatcaaacacaatagcagaataataggaagaaaccaagagttgcaatgcagagggaaacarggccaggttgagggctcccagctttattcagggaaccttagaattgccgaagacttttaaatgtgaagtgacaggattacatatgttttaggaagctcaaactggctacaatttggaaggtggtttggaagggagaaagggtgagagaggagagacaagttgggaggttttcatagtggtccaaagtaagtagcacggtggccttgaataaagttgtggttttggaggtagaatcagcaatacttggtcattgattgggtgtgggtatgtaggacaggatgacccagttctcctgttatcaagaccagagtgcttgcaagaggtgtttgtggggacagatttataagaagtaagagagaagatactacatgtgtgaatgtaaccatgaccccaaaattctgcrtttctaactacatcttaatgggcttttgcctaatgcatgacattttattaattgaattctttttcctttttcagtttgaagattagggagttggrgtgggtgagtgaaggaaggagctcttgagcgtctctgtagaaggttgttgtctagaggcagtttggttgagaaggattaattcagtgtttgcaagcaatctgagctgctcagtcagtcatcccagctctgcaaattagtatgwttaaataaattcacaawgactcagtttgatcatccctgatatgggaataatacttatttcttattaatttttatgacaatttaaagagataatgtctaacacatggaaggtgcttagtagatggaaaaataccttttggcttgttagaagctaagttcctctgaaatggaacaaaatygtaggctgttagtgctcaaacactggtgacttgtcctagagactgagccaggcctaaattctggtctcctggctctgtaaccattccacattttttgccacatacttgcatagccaagaggaactgtggttttgtgtgtgtctacccagagttgctctcttgaaaagagttctcatggccttatgggttttgtgtcctaagccaagtggaagcaccctttcagtcgctaccagacccagaagcaggmaagtttctttgtggatgagaggacttctctccaggtccccatgatgcaccaaaaggaaatgcacagattcctctatgaccaggatttggcttgcacygtcctccagatagaatacagaggaaatgccttggcgctgctggtcctccctgacccggggaaaatgaagcaggtggaggctgctctgcagccacagaccctgagaaaatggggccaattgctcctgcccaggtaagtgtcacagcagaaggatgctggctgaccttgctcaagaaccccagcaggtcttgatcaactccagctgcaaaagcccaacatccatctcgattaggctcaccatcttgtcctttactaactgtgtgatcttsgcaattttctcacmttttttgggcctctactgtaaaactaagaacatgatacctgcctcattgggttgctcagtagattcattgagtttctacccatagagaatgtagaacttagactggtacgtggagcataagaagtgctcaccaggcattgactgttattatactttcctggtgtctgtctgatccccatctcctttcctcttgctttcctctctccccaccacaccctcccataacaattcactaacagaaggaacagaaggtggttaagtacagcaaaaaaaatcagatcagagacagtgaaaaataatcatggctgggtgcagcagctcagacctacaatcccagtgctttgggaggccaaggtgagaggattacttgaggccaggagtttragactagcttgggcaacatagcaagaccctgcctctatgcaaaakraaaaaaaacatatatagctggacatgttgatgcatgcctatagtcccaactacmtgggaggatgaggaaagaggatcacctgagcccaggaatttgaggttacagtgagctatgattgtgccactgcactccagtctgggcaacaaagctagatcctatctctaataaaaaattattattatcatyatattgttaaagggtgcttctaytttaattaaaacatgtttaaaaaattaaatattaagaacattgtaaacattaaagttcctgttttatgtgatctctaaactatttcccatctcacttgctttatggtttgtagttttatcacagcaacttcagctttttctagtttccctagacccccttcaccagctaataccttcttgggggtgcatcttcttttatggggtactctgagatgaaatctggtacttagttctacttactgcttgctgcataacaasccaccccaaaaccgaatgactkaagacaatcacttccttggttctatgggttaactgggctcagctgggcagttttcatgtgttggagtaggtggcagctggagctgaagccactgaactctcttcacttatgtgtctggtgcctgtgctgggctggctggaagagattaaggctggcaggcatctctctctgcatgtagtgtctccatgaggctagctcaggttcagcagatcagcatagttaatactggtatatggcagctagggtctccaagacagaatatttcaaaggcaggaaatgaaagctaccagtctggtaaggcctaggcccggaaatcagcacagtggcacttctgccacattgtattggtggcagagccaatgggtggttggagagccaatggctgggtggtgcagagcccacccagattcaaggggagggtgcatagatgccaccttttgacggtcatcttgaatccaccacaacctgggaggcactagccaccccacatatccaaaagtgacttctctcagcaccccattcacactgaggtaccagggatagagaaggcattttgtgtttgggcagagattaaaacaccaaataagaggcacgggccaaggggagaggccaggatttaagagattattcctgttgtccatgaagctccayggctctagtcagttgctaatttcagccccatagtccctggctcctttggggtgagtcttctccttgcccccatcacagaagggagtgccatagactcttctagaccagtagattttccctcagggagggtttggtttgacttcttcccactttgacattctaaaagcaaaactgacccaagttactcctctaaatctcagatattccttgtgccagagagttacaatatcttagtatccatttttaggggcttttagatataagaacttcagactctgccatgtttcactccattcagatgtgaggcaggttagcttgccaaggggaactgcacttcctggcacaccattcgtgtatgtattcwttcacagttgttaaacatccactgtgttttgggctctctgtcagacccctgccccactagactctattccaccccccagccaactggcgcgggtcttgcttcccacccaagtgctgcctatgggaaacttgtcaaatagccctagatgtcctcctacttcaattaggcatccagaccctcatattgcccaggagtcaaaccagccacgattctctaacmtgaattcgattttctgaggcagaagtgttcaagttggttatgaactagtcatgctttcaggtgcctgggtagctgtcaaaccataattataaagaagaataaccccagagagaaagggcagatttgctgtggatccaaagaaatttctgaacttaacccagggaaatgtggcaatcagatggtaaagatgctccaaacgcagaagcaggagttcatttgtgccctatgcccaacacacatgatctcccatcagatcctcacaacagccccaaggagggggcatcaccatgccatttaacactagaggaacctgaagtggagatgggtgagagacaatggctgcttgtattaggggatgccaggaggtggatttaggacctagttcagaagctgagccaacagaacttgctgatgcatcagatacggaagtgggaagatgttgacagtatttaccttatgtggtcatgatttggattccatcagttcagccttgaaaaaacatagccaatatctgacacctagaaagccctctataaatgtgatgaagatgacaaagacaggtagctgtgcctggagtcctctcagatccagccacaagatattccaggaggtccaaagagaagggagctgtgggtatgggtagtggcatggtccgccatagtgaacagtgtcatgggaagactggttgcttctcacgctgggaaatgcctctctcccatggctcaggctgccracagacagagcaggagtgrcacatattaacaagagagcaccatttctctgtctgtttctctctccagtctgttggatttgcacttgccaaggttttcaatttctggaacatataacctggaagacatacttccccaaattggtctcaccaacatactcaacttagaagctgacttctcaggagtcactgggcagctcaacaaaaccatctccaaggtaaagtggtgaacatggatgtttgtgggcaggtgggggtaggtaggaggtttctcctttggcatgtgggacatttaaaagtcaagttccttgttctttgtcctgtgcagactatttaataccacagtctttaaggcatctcttcatgggcttttccttctctacctccccttccttaggtcccttctattcttcatggcaggaatacagtgtcttccccttgaaggcccccaaactgatgctgtcttcatctcctcttgtcctctaggtgtcacacaaggcgatggtggacatgagtgagaaggggaccgaggccggggctgcttcaggcctcctctcccagcccccatctctgaacaccatgtcagacccacatgcccacttcaacaggcctttcctcttgctcctttgggaggtcaccacccagagcttactcttcctgggaaaagttgtcaacccagttgcagggtaaccatggtgggaggccaggagttatcttatctcatcctggaccaaacagataggccagaaccagcctgcatcctggggctgctatgtggttcagttaatcagtgtgccaagattctaataaagttgaccttgggttctgtgaacactaaggagcaatycttacaagggaggaacagcttctagccactcattcacaattgtcccatatctggtgttagttgtgcttagaaagttgaagatgagaacgaccctcatgttacagcctcccaggagatgtccaccgctgctgccaccattgtagatatttgttgagcatcctttgggtaagggtcatagtgaaaaacacagggggcatcagcaggagtaagccagtctttcccttcacagtggccaatatgggctgtacagacaagagaggttgtcctaaaatgtcattgcccagacatcaggggctagatcccctcaagaggaggttggacctgtgtcagggctccaaattacagcccatgtagaaaagcaggtgtgcagatgggccggcgtaatcacgggtcaacctggagggaggtcaagttcaagcagcaagaacagcgtgtcaaagcccagggcaacacgaagaccaaagaaagcaggaaggcaaacatggccgggagggatgatggacatagggcagggtcagtggggtgaattgagggccatattsaattgcgatgcagcctccattagagatcgaaaggctactcttccatgtgtgcctctccaagaggcattcatttgaaagtagtggggaagcagaaagagatgcccagctgcatgtgtgtaccacttggatgacaatacccatcactacaatgaactccgtgcccagacacgcagcrgggtaggatataggtggtgcatgtctaggaaggagccawcccagaaagtgctacagtggtggaaacccctgaccctactccaaggaggtgaggctcagatcctgaagaccaggtaagctttaaataaagagaaaagggtaggatagtctgggagagggcaggggagagatgcgatcggcaaaagcaatgggtaaagagaggaaaaggtatgccccaataaaatgagagaaaaccagctttgcagccatggaaagttcaggtagggtcatggtggaaggtagtgctagagaggtgttcagagataaaaggctggaggctttgggtccccgtggagtgagtgtgagcatggccttgtagacagtggagagtagctgtaggcctgtgggcagatgtggatgtggacaaagtagtgatggggaagtcawctgtcaattgggcagagataagaaggagtagggtgcggccagggtaaggcccagccgggatggcaccatgaggtccatttgaccactgaccatgctgcatgcagggctatcggagcacatgcatccactgcttcaacacagacttattaaacacctcctatgccaagcattgggaatgcagcagtgaacaaaacagataataggtcctgcctacatggggcttacattatagcagacaaaacccggcagtaaacaaaacaagtaagtaaaatatgtgctgtttgacaatagcaaggacaaggtctttgtggtcaagaatatgcccaggaaagtccctacagtgtacatgaaggggcagctggcccctgatggtgacaaagtggattgctcagtggcaaagctggatttaagcccaaggctgcaatgtatccacattcatccttcttgataaaagaaaactgcaactgaaagwtccctccctgtcatgtcttctaagaaagtggcacttgattgagaccaaagtagtcagtggtctgaagatattcattaactgtcatggaggtakggaccaacccttcaaggcttctgtcttctgcacccagtgctgcatagggaatacactgttgagacaagtcttgtgttcactccatgttagacaccattataagcagttgacagatgtcaataaactttctatttccaacagtcatgagagggaggcactgctacatctttatcttacaggtggggaaactgaagcaaaatgtgctagcatgtgcagagcctggatttgaacccaggctgttcatctccacagcccacatgtttcatctctatgccacacttcttttgtgagcacaactcaaaagcccttcagccacgcctcattggctgccataccacaaggatccaactcccagggtcataggaagtgggagagggaagaagccacatgagcagtagcatctggggaagactttctagggaaagacccagaagcatggatggaaagttggtggtttaagaagcactgattgaggacagggatgtgccctttgttgtttatttctgtattctagtacagagactggcataggataagtaaaaaaaccttttctaccttaatgctgtgaggggaagttgtgtcacatggcagaattccatgacaaagactcagaggcaggaaagaaagcaccctggtgaaggacatgatataaaggtgcactaagttttgggagaaaacttagtgggagaggccccgctctactccaagctgtgtagacagcactctctctctctttggcctcttcccttcctttctccttgggaagccagttgaggcaggctccctggactctagtaacatcttacacccttcagctggctggacaaccttggacacattgctcaacccctctgtgcctcaagttcttctgcaaaatggaacatgcaaaccttgctttaaagaattgtggaaatcaaatgaatacataaatgtgaaacattaagcacttgaaatccactaggtgctcaatgaagcttccttctggccccatcttttggctcctccaaccgtcaagggtgctcttcaagggtgctctttcctcccacagagcagagttccgtaccaggtaatgccaaaatccccccagtggtcactggccacataactacctcccagcgaaaccatgaaggctgcacatcaaaacacaaatgtgttgatggagaggcctcaggggccttatctgggcactaaaagtgacatctgcaaaacagaaccattcttgctgcaggaacattagctatgacactgtggcactaagtgggggaacgctggcccagggatcagggctgaaattgcagaggctcacgtgaaggagagccacatgattttctctagaaaagcatcattgttagattgttcactgggtttcttctcctttttctccctaagataactccttcagtcatctgtgaattaggtaagagtctccctaagcgtacatttcagatgtatttacactccaaaccaaccttttaaccacctagaagaatggaccattttcaagataagtcaacagccatctaaaatttatattttcagagatcttgcgatgctctctgtggtggaaytgaaccatctttgtaacgccatagagtcccaggtatatttattttgaccctggaatggaggtaaatggctttcaatgttgggactaatgccctggccagttacagccratatgaacacacaggtccaagtaatgaaaatatcactagggacactggtgtctgtcactccacctcaaggttccatgtgtatcatagagaccatgaaaatattcataaaatttctattccctttattctggccatgaacagagctgagacctttaaagttttctatgtatgggtgggtctgtttctagactgtcatttacaattctattgaatgatttgtctttccttgtgtcaatactacgctgtcttatttaacctagctttataagtcttgatattatgtcaagtcctccagctttgtttatagaagtattttatttgcttatgttgttttgttttgctttcaatgtttgttttttatcctgcccactccaccaattctggttacagtggctggtgactctgtttctccagctgccccaccccttctcttcccacacttatataagcctcaagtcctatgttaaaactttttatttcacgaagtatttggagtgtctctgttttcctaacccatatgaaaacatctttgttctgccttcatgcttgaaggatattttcactgggcacacaattttagatagccagatgttctctttcagtgttataaagatgtcacccattttgactttcattatctgagttaaaaagttatctrtaattactattattatcctttgcaagtratccacttttccttttggctgctttaacatttttctctttgtttttgtctttcaattgttttcaaatgatattcctaggtatagttttccatgtatgaatcctaattaatcttaatcttaattaatcctaattaatattagggttcatacaccttcctgaatatgtgacttgatgtctgttttggaaaatagatactatctctttaaaaattgcttctattccattttctcttctttctctgggacaatcaaacatatatcagacgtcttcatcrtgtgtcatgtctccttcacwcttttctgcattttctattcttttttctttccgtgtgtaatctggatgctttctgcatgcctatcttaaacttctagtcttttctgctatgtttgatctgcttttaaataaatctatcaaattcttaatttcagttcttttgatttttagtgctcgggtttttattttactctttttatgcatttttgttctctatgaaattctttatattttgttccatcttattacacagaatgatcaaggttgttttaaaccctgtgtttgataactccaatatctggatcacctgtgaatctgtacattctattctatgtttttctcttggtgtttaatcagtttttctgttacctggaatgcctggtcattttcactgaatgccacaaagtgtgtatcaaaaattatgtggctttgggtaatactatcttcctcaagaggagaatttattttcttctcaggcagatagagtataaaaagactactttgattcagccaaggatggatttcagtcctttgggggtctggtttatttcttttgggccttacccctataatgttgtctttgggagatgtcaactaagagcctgggctayttgtgagggctcctccccgttaacatgtttatataccaatttttgtctcttcccttctgtgaggctgctaaaatctctgctcttctagcaggtggcttttgcatgattatttgctrtctcattccrcacacgcatcacttatgaggcagaaaattaccttgaagggaaatttcatgcrrgacattgtatcwgcttcatcatgattatcttttatctagaaacttgatcccttgaatcctaactacgtgttgactctgaattccaatttttgtttctccagcccattgacactattaaaggctctaagccagcaacccccgatctttttgacaccagggactggtttcatgaaagacaatctttccacagactggtgctgcagggaatagtttcaggatgattcaagtacattacattaattgtgtactytatttctcttattacattgtaatatataatgaaatccttaaacaactcaccataatgtagtagtactagtgggagccctgagcttaatttcctgtaastagacggtcccatccaggggtgatgggagacagtggcagatcatcaggcattagattctcataaggagcacayaacctagatccctcacatgtgcagttcacaatagggttcacggtcccatgagaatctaatgccactgctgatataacaggaggtggagctcaggcartaatgcgagcagtggggagctgctgtaaatacagatgaagctttgcttgctagcccgccgctcatctcctgttgtgaggaccagttcctaacaggccacggactggtaccagtccatggcctggggaactggggactcctgctctaagcractgtattctgttcacctttatgcctcagacttaaaaccagcaaaagtcctagagkaaaaaggcagcagcaaatgtaagcctcacctcagtgctgttctcctctctctggaatctcctcccaattcttaacttatcgcattcctcattgtgctccagtaccttcagccatctaaattttata

SEQ ID NO: 1588 - DNA, 114720 bp, Homo sapiens
  misc_feature (1)...(114720): n = A,T,C or G, or insertion/deletion polymorphism (see Tables 1-2)
tcacaatcatggaggaagtcaaaaggcacatctgacatggtggcaggcaagagagagtgagagccaaccaaaaggggaaagcccttataaaaccatcagatcttgtaagacttattcactaccatgagaacagtatgggggaaactgccctcatgattcaattatctcccaccgggtccctcccacaacacgtaggaattacgggagctacaattcaagatgagatttgggtgaggacacagccaaaccatatcagaagggaatggaagagtacttattgttgtacaaacatcctatacaaaaattagccaggcatggcagcacgcacctctagtcccagctactggggaggctgaggctggagaatcacttgaacccgggagacggaggttgcaatgaggcgagatcatggcattgcactccaggctggctgacagagagattccatctaaaaaaaaaaaaaaactttacaaaaacaaaggcactttcataaaaaccaatacacctaccatcacatcaccttcgcatatcaactcctccttctcctaccccatttccagtttatccatagacatttatgcttctaaatggctgtgatcacagagccgatacattgtctggttctgctagttttatttatttaacattgctgtaactatttcctcagttgctacatcccttcataattaaccctgctattggttgtaaactattccacggggtaaaatgtattacgatgaaaatcataattttcttagtgttggacatcgaggtttaatttaataaataatgccacaacaaatactttgcatacttagtctttttcccctctcatgaattagatagaaaagtgcgtataattttttttctaagagctgacgaaattttctaaattccctgcaggctgaatatttatcacccctttttggtccctcttttctttaccttgctttattccttgtgggatcttctggtccttgaggcaaggattcagctagctgctgtttcttttttttgagacggagtctcactctgtcacccaggctggagtgcaatggctcgatctcagctcactgcaacctcygcctcctgggttcaagcagctctcccgccttagcctcctgagtacctgggattacaggtgcccaccactacacccagataattttggtatttgtagtagagatgggattttgccatgttggccaggctggtctcaaattcctgacctcaggtgatccacctgccttgtcctcctaaagtgttgggattacaggcttgagccaccacacctggcctttttttttttttttttttttttttgatcagctgctgtttctaatcatgactttttccatcaacaaatctctctgaaagctgtttcttgttctycaaaaaggccagaagagttacgtagatggcttgctaacacttgcctcattgtagtcaactctgtagaagtgatcttgtccaaagcaagaaggggaattctatcaaatagcacaaagctctgcccagacagtctcgtctccagccgacaggtgtatgctggttctttaacctggaccggagtggtatagagaactgtaccaatcagggtccaacyaggaaaatgggatctgctctaaacattaaaatagaggaaatttggctgggtttggtggctcacacctgtaatcccagmactttaggaggctgaggagggtggatcacctgaggtcaggagtttgagaccagcctggccaacatggtgaaaccccgtctctactaaaaatacaaaacatagccgggcgtggtggcaggtgcctgtaaccccagctacttgggagcctgaggcaggagaattgctagaacccaaaaggcagaggttacagtgagctgagattgtgccactgcactccagcctgggctacagagtgagacttcatctcaaaaataagtaaataaataaataaataaaatagaggaaatttggtaagtgaattggttacacagatgaaggaaaagcagagaggtgcactggggacagtgaggcaatgcagagatcagacatagcaggaagccactacctcacctcccttcgaggctgaaggacagagccagaaacacttgtcagaagctgagcccaggggacctgtcccagcagagctcaagtcccaaaggagaggacgtagccctgctggagacactaactgaggttkggtggggragaataccctggcttctccytccctcctgccttttcccctgccaccatgtctcccattggtgggactcaagtggaaaccacaacacagtctacaatacccaaggagcagggccagcccactgccggtccccaatgccatgacacaaggcaaagaggaagagagtgaagaataagcccaaaggcaaaggagccaggcattagtacaaaatcacattgacaaatattcrttcaaaactgcatcaaggccagaaagacaaatcctgagagttggtcaagaaagcaaaaagaaactatacagttttgttttcagtacctgtatcaaccatacacatttacatycttagttgcaaatgataccactagcttgttggagaaaaaaaaacgttcatcaaagggtatcactaggtcacagaaattctgggagaccagaggcaggcatgggaactgcacaaccaggagcactaaacaagtgacacactgagtcccctgtggccacagaggtggggccaggcagacaccaaacaggacaccagactggccctttctgagaccagccagagagttgtgtccccctgccagatggcactggcctcccatagcatagattcgctcccttttctgcctcctcctggttcttactagttgagtctcttgcagtgcccctgctgtgcggcctgtagcacytgcctgcaccccagctgcaaataaagctggaaaagagagtcctggcttctactgtggggaaggggaacgcaatggcggacgtccaagtttaccaaagggaaatcgttcaccagatgtgaggtggccatatgtgtgataactgtgcaatttttgttcactacagaatgttcccaagtttgccacaaagtgaccatgaaaatggatatgaataaggggggtaatgtcactcactgaaataatggcacaatgctaatgacaacaccacttgccatgcccgggctgggtcctttcatgccctgggcctgatggggacaaatctgcatcccgtggccatgtgatcgctttgtcttctgagggwgtcacatcagagaacccaggctactaccaagccttagagttcgttattatagaagggaactcaggggacacccagcctccttcccaccaaacacgaccctcttcagagtctcctgacaactctagctgttagaaagatccttttcctaactgcagttgatgcgtatttctgcaatgaggctcttctttctgaaattcaaaattcaatgagtgactgccaaaagaatgcataaaagtcagctccacccaggggcaagagttagaaggataagtccargttcatccctgaggaagaccattttaggaacctcgtcttcagagaccatcaggcaacccttttattcaccacccttgagattacattctggtggagtaagactgattgagttatttttgtcataaccgttaatagagtatcccctctatgtctttgactgttttagattctagggataaaaagatgaataagacgtggtgtttgctctcagcaarcccacagtgtagtaagaaaggcaaagacaaaaatagataatgggggtgtaactaaggtaagaactacaaaaagagaattagcaaaatatgataagagaggctgaaggaagaagctgagaagatccatagagagcttgaaagacaaggtacccttgggaatgacaaggaggaggccctgacagggctccaaggcttctatatgagagaccagttgagagacagccatgttgagttcttagaggtgaggtcaggtacactgtgtctatccatcagtgtggctatgcaggaatgggagtacctgtgtaaaagactttctctgatgagtgaataagaaaattggagacttaaggcctgaatatgggttggtggtgtaagtagatgttctctccatagtatgatctttaggaattattgaaaaaaaaaaacctgcttattcctttcttccacccatttaaaaataaaaatcatgcaaaacaaaacaaaaaaccctctgtagcagaaatttttctatgaagaaccagttaacaaatagttcgggccttgctgggcctcacagtctctgccgcatctattccacgctgctgctgtcatgcagaagcagccagatacagtgtgtaaatgagtgtgtggttgtagaccaataaaactwtattgacaaaaatagtcagtgggctgcctttggcccaagagccatggttggccaactcttttttttttttttttttttttttgagacagtttcactcttgtcgcccaggctggagtgcaaaagtgtgatcttggctcayggcaacctctgccctccaggttcaagcgattctcctgyctcagcctcccgagtagctgggattacaggcccccgccaccatgcccagctactttttttgtatttttagtagagacggggtttcaccatgttggtcaggctggtatcagactcctgacctcaggtgatcccccctcctcagcctcctaaagtgctgggattacaggcatgagccaccacaactggctggccaactcttgatctacrgaatcaaatttgcaaaccatcgcctaccactttgtttgccagctcttttctaagtgcacattttgaatttgtgtgtgtaggtaggatggaaagagtcctctgtgggagggcatagggcgactctggaagagaagtgatgggcagaatgaagaggtcccactgagctgtgtgaagaaaaggatctgctaccagagagaaggacaggcccactcattcctccttgaggagtgcctcctggccgcktgtcctgctgtctaaccgtggctccaaactgactggttgcatcttggccaactgctcctaggcagggctgcatttcgtccccgaggtgacagtgcacatgataatttatattttggtgcaaaagcacctcaagctcctttgagataaaagactctatataaaactgagttatgaccctgcttaataggagcactgttgcctttttccaaaagtggagttaaacccctctggcatctgcaaagggctggctgtaaaggatcgttggccctttcagccgccctcatttttgctgttgattctgtgtgccataaatcattctcttccaagtccaaaggcggcatttgtatttgccaaaatactaaggaggaggatctccaactggttgaagctgaggttggatctttgctttttaagttgtgtgggaggtggggagcacgcgtgcgtgcwcacacacacacacacacacacacattaatcctcccttaataacattccagaatagctattcccttaccctacaacttcctatggattctcatgacactggttttgtttttgcacaaaagatttgacttggtcagtcacactcctttgttattttgtacttttaaccccctttctctgtggagaaaggctascacgagaaaggtaactttctcttgtccaaagcccaggaccacataggctcggtaccaagcttcttttgggacagtatttgacagggcataccaacacgtctttttttagaaaagaccataagtgtcttatcttactccttcggaattttccgcagttatttaatctctagtttaggaaaagttggtttgagggttcttcaaatctcctcgaacctcttacatcagatctgtgagcttgattcacttgaggtggatgggggctgtgtttgccagcatacctcatttccatctctcctccctactgactagaaaccttgtggttaaaataacacacagcctctattcagagctcaaacttagagctgctatcggaggaggattttagatttaggaaattctcagcagagcatccgaggggcttttgaaaaattcaattctttagacgctcatgaagaaatcagggatttcctcaggtaaatattttcttcccttttccattgttttgttgaaaggatgattaagaaaatagggccggtaatcactgaaaaacggcagctgctttctagctttgtgctggtgaacagggcttgtgacagtttctctgaaaggggaataaagtgataaaacaaggatctcctggagagagagctgcagaatcaattctctgtttgtggagaaagcgctgggtgtttgagaaagagagatgcttcgttggagtcgccgcatcgcatttggttgtatatagattacaaaggtagaaaacagtcggttggtcttattcactgtctggggcagtggctctgaggttggtcacgtgaccagctcatacagaagcggttcccagcactatcttagcatcatatgttcttattgaataaaactaaactggttctccttccttgtggctgctcttcaagtaatcaggtgccactgtttttatctgtttatatttctatctatctatcatctattatgtatctatcatctatctatctatctatctatctatctatctattcggctttaaaatttttgtgaaatacagttctattatctcatattttcatattttttaaactcatgactttctaagtgatacatcattagagacttgtcttaaatctagcgcaaaatgtgttaacattttcttcaaataccagtaactatggtctcctgaactaaaagaacagttcatttacagaatgagtcatttttctgaaaaacctgccaccacacctcctggttttttttttttttttttaattgtgctgttttgtgttttttggcaaacatctgtgcctatgaaagctttcaatatatctcaytgtggctggaccaggtattttctagtttgccaatccataactctcctgagacattattatttgtcctttgcagttgcatttgaaraaaatttcctacctacttgatgataaagccaaatcaatcaatcagttgtcagtcaaacatttattcatgtgcattatatatgctctgcatcaaatagttaccagggttgggggaagacagtttcaaagaagataaatatcacccttggtgtttatcctgtatctcccacccacatttatcaaataattacaaaacattatcaacagcacaaaatgaagtgccaaatttcaagcttcagattacgggtgaggttgaagtggccatagagctaccattcaggagagcccattgtgcacggggaactaagtcaaccactttgcgatcatcttattttattctctcaatagcccttattttacatatgaagaaagagaaacttacagagggggctaagtgcccagtgtcataatgctgacgagtcgtagacacaatgctcaaatctttaatgcacccaacctttacgaggctgaggctggagaatcatttgaggataggagatcaagaccatcctgggcaacatagcaagatccatctattaaaaaaattatttttaaaggaaaatgcacctaagaasaagtggtccctgggcagggtgccaaagggtgttcaagtattcaaatggccaggaggagcagtgtgcaggtgaggaacaggttggaagggtccagggtgtctgggagacagtgcaacagtgcatgccctgatgagaggtaaaaaggaagtgctaggtgaagagaggtggagggaggtgggcccagaagtcgccctatgaggagggtggagccaggttctgatgaatgctgctctgagccatctgtctgttttgtgcttccttcttctctgctgggaggctttttttttttttttttttttttttttttgacagtgtctcgctctgtcgcccaggctggagtgcagtggcacgatcttggctcattgcaacctccacctactgggttcaagcgattctcctccctcagcctcccaagtagctgggattacaggcgcctgccaccacgcccggttgatttttgtatttttagtagagacagggtttcaccattttggccaggctggtcttgaactcctgacctcaggtgatccactggctttggcctcccagagtgctgggattacaggcatgagccactgcacccggctctgggaggctttttgcgtacctcaccgaggtttcatatcctcccgcatcaggtctttgcccaaatctccactcatttgtgaggctttctttgaccctcctattcaaagagaaccccatgaccaccttcattgactctccttaaaaattgtgacaaaatacatataatatataatttaccattttaaccatttgtaaagtgtacagtgcagtgatatttcatactgtacattcacgatgtcatgcaaccattgccactgtctagatctagagcatttcatcacccagaaaggaaaccctctgcccattaagcagtcacgccccattatcctctttcccaagctccagggaacccctgagctgcatttcatctctatggatttttttttttttttttttgagatggagtctcgctcttttgcccaggctggagttcagtggtacaatcttggctcactgcaacctctgcctcccgggttcaagcaattctcctgtctcagcttcctgagtagctgggattacaggcatgtgccaccaygcctggctaatttttttatttttaatagagatggggtttcatcatgttggccaggctggtctcgatctcctgacttcaggtgatccacccatgtcggcttccaaaagtgctaggattacaggcatgagccaccgtgcccagtctggatatttcatataaatgaaatcatacattatgtgactttttgtgtctggcttatttcacttagcatwgtaatttttttcgtttgtttaaatttaatttttctaaagagacagggtctcactgtgttgctgaagctggagtgcagtggcacaatcatagctccctgcaggcagctttgaactcctaggctcaatcgatcttcctgtctcagtctcctgagtagcttggatgacaggtgcatgctgttgtacccagctaattttttktttaaattttttgtagagacagggtctcattttgttgcccaggctggtcttgaactcctggcttcaagtgatcctcctacatcagcctcccaaagtgctgggattataggtgtgagccactgctcccagcccagcatcatattcttaatgtttgtccatgaggtagcctgcatcggtcctccattctgttctacggctgaatgatagtccattgtgtgtatatatcacattttgtttatgctttatcagttcatggtgatttgagttgtttccacctttcagtcattgtgaatagtgctgccatgagcatgggtggacaagttttcacttaaacccatattttcagctctttgggggcatctacctgggagtggaattgctggatcatatggtgagtctatgtttaactttttgaggaactgccaaactattttccacagcagctgcactatttcacattcccaccagcactgtaggaaggttccaatttctccacattcttgccaaaagttattttccggttatttttatgatcgccatcctactgggtgtgaagtgtgagctcactgtggatttgaatcacatttccctcatgactaatgacacggagcctctttttatttgtttgttggccatttgtccagtcattcactttgtatttcctttatctggctttatttttctttatacatagctttatgatttatcatgtcatgtcacatcacatttttacttatttaaatgaataaataaaatgtaacgtatctcctcctaggactaygaaagcctcatgaagacagagattctgtctactattgcatctcagtacttaggactgtgttcatcactgtgggarctcaatatgtatttgcagaataattgaagagcaaattatggttattccccagccctgggcctaaggtctctccaatcttcagatgggtcaatggtgggacaggattgcttgaggccaggagttagagaccagtctgggcaacatagcaagaccccatctctaaaaaaaatttttttgaagaaaatgcacccaagaagaagtaacccctgggctgggtcccgaagggctgtcaggcactcaaatggccaggaggaacagtgtacaggtgaggaacagggtggaaggtccagagtgagtggagagccacagctggtccaaacatcagcaggcccatacatcaggggtccatacatcaaccagtccatatatcaggtcgggggtagaggcatacatcagcatgttcacccattagctggtctatacatcaggggtctatacatcagctgccccatacatcagttagtccatacctaagtgggtgcatacattagctggtccatacatcagggggtccatacatcaaccagtccatatatcaggttgggagagaggcatacatcaggatgttcacacatcagctggtctatacattggggtctatacatcagctggcccatatatctgttagtgcatacctgagtgggtgcatacatcagctggtccatacatcagtgggtccatacatcaactggtccatatattggtgggtcactcatcaggaggttcacacatcagtggtctatataccaggggtccatacatcagctgctccatatatcaggggtccatacatcacctggcccatacatcagctggttcctatatcagaggaggcatacatcaggaggttcacacatcagctggtccatacatcagtgcgtccatatgtcaactggcctatacatcagcgggtccatacatcagctgtcctatacatcagggagtccatacatcagctagtccatatatcggggagggcatacatcaggaggttcacacatcagctggtccatacatcaggggtccatacaccaacaggtccatacattagccggtccatacaccagctggtccacacatcagctggtctatacatcagctggctyatatatcagggagtccatacatcatctggtccatgcatcagtgagccaatacatcaatgagtccatacatcagctggtctatacatcagctggcccatacctcaggggtccatacatcaggaggttcacacatcagctggaccatacatcaatggtccatacatcagcaggtccatacatcagcgggtccatacatcagctgcacacatcagctggtctatacatcagcggggagtctatacatcatctggtcgatacataagtgagtccatacatccatgggtttatacatcaattggtccatatattggggggtcatatatcaggagcttcacacatcagtggtccatacatacatcaggggtccatatatcagctggcccatatatcagggggtccatacatgagctggtccatacayaggggggtctacatatcagctggtccatatatcaactggtccatacatctgctggtctctagatcagctagttcatamaccagggggtccacacatcagctggtccatacatcaggtggttcatacatcagcaggtccatacatcaaggggcccatatatcaagaagtccatatatcagggagtccatacatcgggggcctataccatattatttatcctccccacatcccgccgatgctgccatggcaaatcatagtatccttccaccatccacccaacccttggattgtggggatggaggctggagcagcaaaacaattatttggataatcaaggtttgagatagtgagaaccagaactcagaagccacaaggagagcagagtgacagggacagacaggagagagacacggaaggaaaaaaaagcaacaagattgggtgactggctggttgaaacaacaggggcttgagctgaagacagggccacaggcatccatcaaagataacttcaagttttgaacttggaagtctggggaaatggtggcaccattaactagatagggacattaggagtaggaaaaagggaaggcttgctttctatttgagaagaaaacaagagagtgaaaggtccttaatgaaccaagcctagacatgcatttcagagagtctgtgatgatgcccctggtacaggcagcctcaagaatctactgtggcttctttgtcccatcaaggccaattccgctccgccartcgtagtctccctgcttggttgagaagtggacagaatggcctcaatgcacacagacagattatcaagataaccaagcatgggggctggggaggggcagcctgaggacgagggaagatgctgggtgccagggcgtgcagcggagagcagctctgtggccctctgtctccaactcaggctcccgttgtttcaaccagcaagttgggccaaggactccaagctccacctcctacagattcaggacagagaaaagtctactctttaaatgttcactgtgcaacrtacttacaaaaacttgccaaaagcatgtgagagctactttttccttttttttttttttaatcttgagcacgtagaaggggcccttatatttcacagggattttctcttccatgggtgtgtaggctgaaatgtaagtttacgaagaaggcatttgttagctaggctggagaattctgacttaaagaagaagcatgtagtggctgaaatctcctcccacggacttagtgaaaactctagtgaggggatgatcactgccatcatttctttctggctttggatactgccaggctgctcatgtgtgacaactaaatgttgggatatcttcaatgaatgaacaatgaacaatgaacgatgggatatcttctccttataagcccctcactctgagtgtgtactgtggttctgttcctgcaatctttctgataaaattctcgtcgccccattgcaaagcagtgttcccaaactcaaggctatgtggatgcctatccctctgcaattctgagcttgaataaagagaaagccttggagagccaagttcactttcctgacaccatgacaaccacccctgataacgccatcactcttttttttttttttaatatggagtttcrctcttgtcacccaggttggagcataatggcatgatctcagctcactgcaacctccacctcccaggttcaagtgattctcctgcctcagcttcccaagtagctgggattacaggtgtgcaccaccacgcccggctaattttgtatttttagtagagacggggtttcaccatgttggccaggcgggtctcaaactcatgacctcaagtgatccacctgcctgggcctcccaaagtgccgggattacaggagtgagccaccgcacccggccaccatcattcttaagatagggctcctgacatatttctggaacataacctactgactaaggtatcctagacagaaaaggggcattccaggataggggtgcatattttattagacactatggccatttttttttaagttttaaggtagctgttctttaggcaattgaaaaggaagtaagtttcatcttaattctgaaatgatggggcttcaggattgacttccttggataatgtgttttccgatttcattcaatcatgcattaatttagatacctcatcatgttacttgaaaggggtcccaatccagaccccaagagagggttcttggacctcatgcaaggaagacttcagggygagtccatagagtaaagtgaaagcaagtttattaaagaagtaaagaaacaaaagaatggctacttcataggcagagcagtggcgacggctgctcaactgattgtacttatcgttacctcttgattatttgctaaacaaagggtggattattcatgagttttccaggaaaggggtgggcaatttccagaactgaagtgtcctcccctttttagatcatatagggtaacttctggatattgccattgcatctgaaaactgtcatggcactggtgggagtgtcttctagcatgccaatgcagtataattagcatataatgagcagcaaggatgacgagagatccctttcatcgccatcttggttttggcgggttctggctagcttctttacctcatgctgttttatcagcaaggtctttgtgacctgtatcatgtgacctcctatctcatcctgtgacttacagtgcctaacctactggaaatgcagccgagtaggtcccagccttattttacctagcccctattcaagatggagtcgctctggtttaaacatctctgacaatcaaatgagtatttgtgtaagcccactgaaaactcatcaacagtcccatggggagggatgtgcaaggctctgtcccaattctccagtgttaataaagaatcaggactgccatgggacagtaagtgacaacagaagagaaatgcacagaaagcagtgctgtgaggacaggcatgcagggctgcctgcacccagccgtggtctccctacatttgagctggcagccttcttcttggcatgcccagccaggaggataataattgagaaatcaaatggggaaatgggcactttgcaaggcatttaarctcaaagaactacaacgggccaggcatggtggctcactcctgtaatcccagcactttaggaggctgaggtgggcagatcacctgaggtcaggagttcaagaccagcctggccaacatggtgaaactctgtctctactaaaaatacaaaaattagctgggcatagtagcatgcacctgtaaccccagctactcaggaggctgaggcagcagaatcgcttgaacccaggaggcagaggttgcggtaagccgagatagtgccactgcactccagcctgggtgacaaagcactacaacgttcatccaaactaatcttctgtgctactctaggcttcacagtgacaaagttctacagggacacatctgcctttttgygttgtactttttttttttttaagagacaaggtattgctctgttgcccagtgcagtggtgccatcataacycactgcagtctccaactcctgggctcaagcaatcctcctgtcttagcctcccaagtagcagggactacaggcacacaccatcatgcccagttaattttttatattttttattttttgtagagatggggtcttgctgtgttgcccagactgatcttgaactcccggcatcaagtgatcctcccatctcagcatcccaaagtgctgggattacaggtgtgagccaatgcccccagcctgcatctctttaaaataataaatgatgtctaaagcataatctataaccgtggttctatggctctggaattgtgaaggaacaaatattggttggggtcttagtacttgaagatattttatcctgaagggagtgctgtgttccttcctagacgtgatcactaggaaataaatgcttggaagagttagcagagttacattaatgctgggtcttaaccaattcagaatataggatgcaaaatcaccattttagatctttacacataaattgtaaaatcagcttttgatgttttacacttatcaaaascagtcgtgtcaattaatgtcaatgctaatttatcatagcagatgataaaaaataacacattggcagtaggctttgacaagcattatgtgaattattttacaatagccttatttttctgattcttaattttctgaaactaatatgaaaattatgttgcattatttcagtacatgcaaacaaaaactgaggatttggactagaaaataggcagaaagggttgggtttgtggttcacacctgtaattccagcactttgggaggccgaggcagatgaatcatctgaggtcaggagttcgagaccaggctggccaacatggtgaaaccgtgtctctactaaaaatacaaaaattagctgggtgtggtggcacgtgtctgtaatcccagctactcgggaggctgaggcaggaggatcacttgaacccaggaagcagaggttgcagtgagcaagagagcaatactccatctcaaaaaaaaaaaaaagaaagaaagaaaagaaaacagacagagagaaaggagccccttagggattgaatgtcacagttgcaaggctggtgacagcacagtcaatctctgcctttgtcttcttttcatctttttagatatctgccattatagggatgttgaaaaattattttcacctctctcatgcatacctgtctcaaagaaatcattgccaactggatttagtaatacagggcaggacagcagctcagtgaagagggtgcatttaggaataaaagtgacctagatgttcctacaacctgcctctttctagcaagtaactcaagctttcaaactcatttcctgatctgtaaagtaaaaataataaaagctcctagcctgcaggaatgttgtgacaattaagtgagctaatgtatgcaaagctcttagcacattcaatcaatgctaactattattatcacaggtaacatgtgaataacagaattgagctaccatttttcagccaacccccaaccctccgctmttctctcttctctaagtttaattgtaaaacacagttcatttaaaaaacaaacaaacaaacaaacaaacaaaaacaaaaaacttttgacaagcatatgtttttaattttcaaataatttcaactttttttattttagattcaggggctacatatgcacaggtttgttacatgggtgtattgtgggatgctgaggtttggggtgtggatggtcccatcacccaagtagtgagcatagtacccaacaggtagctgttcaacccttgccctcctccctggacgctctagtggtccccagtgtgtctattgttcctatgtttatgtccacgagcactcaatgtttagctcccacttataagtgaaaacatatttggttttctgttcttgcattagtttgtttaggacaatgaccttccgctgcatccatgtggttgcaaaggatgtgatttcattctttcttatggctgcatagtgttccatggtgtatatgtaccacattttctttatcaatccactgttgatgggcacctaggttgattccatgtataaaccacagctctaataaagttactcttctgctcaaaaacctgctactgaatcaaatccaaactcccttaacacagcatgtaaagccccttgtgaaattgcttcactctccctcccacctgcaaccctctcaggacttacgctccacgacctctgaaatcattttccttttcctgaatgagccacatgcccccaggcctctgtaagttaacttctcagtttcctctttctaggaactttttcctccctctctgccttcaggctagttccaaccagaactattcaaactagagttcaattcttttggtgtatccccatgatactttctttgtgcctttgccatagcacttaccactctcccattgaactgcatttcctgtgttatatggcaaaattaaaataatacaaaaaattagccaagcgtgatggtgcatgcctgtaatcccagctactcgggaggctgaggtaggagaatcgcttgaacccaggaggcggaggttgcagtgagccaagattgcgtcattgcactccagcttgggcaacaacacaaaactctgtccaaaaaaaaaaaaaaaaagaaaaattgactcactaactgtttattatcagtaggttattatagtagcaatagagaaagggcttatttgggatcaaaagaactggctgtgagtgtgtgtgkgkgtgtgtgtgtgtgtgtatttatacataaatatacaggcatttcctcatttactttaatatttgaacaggtattttcttatctattttaacatcaattttaacatttaacatttattttaacatttgacatamaacgtttgaagttccttccaactcttaagtgtatgaatctgaattatttgcctttatctccttacatacatctttaaatattatggcaaaagaacaaccaggattgcyggatcatatgataattctacttttaatttttgaggaacaaccrtactgttttttggtagtcctatttttgggtatatatctcaaagaattgaagtcaagatcttgaagtgatagctttactcccatgttcactgaagcactattcacaatagctaagatacagaaacaacctaaatgtccctcaggagatgaatgggcaaggaaaatgtggtctatgcacacagtggaatattacccagcattaaaaaaggcgaaaatcttgccatatgcaacaatatgaactgggaggatgttatgctaagagaaatcagtcatatggtttggctgtgtccccacccaaacctcatcttcaattgtaggtcccatagttcccatgtgtcatgggagggacctggtaagaggtaattgaatcatgggggtgggtcttttccatgctgctgtcaagatagtgaataagtctcatgaggtctgatggtttcataaaggggagttcccctgcacatgccctcttgcctgctgccatgtaagacgtgactttgctcttcatttgcctctgccacgattatgaggcctccccagccatgtggaactgtgagtccattaaatctctttcctttataaattatccagtcttgggtatgtgtttattagcagtgtgagaacaaactaatacaataagccaggcaccgaagggcaaatactgtatgattctgcttatataaggaatctaaaatagtcaaactcatagaagcagagagtagcatggtggttggcagggtttggggtagaaagcggaaggtgttgtttaacaggtataaatgttcagttttgcaagatgagtaagttctagagatctgctgtgcaacattatgcctataagttaatattgtaatgtgcacttaaaaatgtaagagggtagactgggtgcagtggctcacgcctgtaatcccagcactttgggaggctgaggcagatgaatcatctgaggtcaggagtttgagaccaggccggccagcakggtgaaccctctctctactaaaaatacaaaaattagccggacatggtggtaagcacccactgtgatcccagctaattgggaggctgaggcaggagaattgcttgaacccaggaggtggaggttgcagtaagccaagatcataccactgcactccagcctgggcgacagagcaagagtttgtctcaaaaaaagaaaaaacattaagaaggtatgttaagatcttacgtaaagtgttcttaccacaataaaataataataaaaatcataaccaggattctgtcgtctagagccacagaaaattgactaggtgggagatgagttgtggagtggtctgaagggtagagtactagcttaccctctggccctcactgacatttcccaggcaaagaccacactggcatctgctcattacttcagtcccacccctgaggtcagaaggttgaagctttcctgttcttcattgcaacactgtacatgtatgttagaaccttgcccacagtagacaccatgcaaatgtctctaagtgaatgagtggataatctcccctttcactgaaacacagcaaagtgaagataagatttcttaagatgtttatgacaggattttatgcttaaaagactatgaaccaaaaataaaattccaagccccccaaccacctgaatggacccctcctctcagccacaggcattctaaagttagcctgagccgggcgtggtggctcaggcctgtaatcccagcactttgggaggccaaggcaggtggatcacttgaggtcatgagttcaagaccagcctggccaacatagtgagaccctgtctctaacaaaaaattaataataataaaataaataaataagttagcctgaaaaactagtttcatgccatgataggaaaggagggtcagacatgcctcatgacaccctcctcccttttggaattactaataaaacagactctttttttgagactgagtctcgctctgtcacccaggctggagtgcagtggtgtgatcccagctcactgcaacctccacctcccagtttcaagaaattstcctgcttcagcctcccgagtagctgggattacaggaatgggccaccacgcccagctatattttttgtatttttagtagagacagggttttgccatattggccaggctggtctcaaactcctgaccttgtgatccacctgccttggcctcccaaagtgctggattacaggcatgagccatcgcacccaaccagaacagactctttaaatctgataagaaacatttataatctattctctctgaagcttgctacctgaaggcttcctctgcatgataaaaccttgatctccataactcgttatcttaacccagacattcctttttattgataataactctttcaaccaattgccagttagaaaatctttgaatctgcctgacttggaagtcccacttccagttatcccacttytctggctgawccaatgaacatcttacaagtattgactgatgtctcatgtctccctaatatgtataaaaccaagctgcaccctgactaccttgggcacatgttctcaggatctcctgagggctgtgtcaggggccattggtcactcatattagtcctaattaccctctctaaatccaatcaagtcattatgcctcaggctttgtttaagaataaagtagaataggccaggktcgggtggctcacacctgtaatcccagcactttgggaggccgaggtgggcagatcacctgaggttcggagttcgagaccagcgtggccaacttggtgaaaccccatcggtactacaaataccaaaaaattagctgggtgtggtggtgggtgcctgtaataccagctacttgggaggctgaggcaggagaattgcttgaacccaggaggcggaggttgcagtgaaccgagatcgcgtcactgcactccagcctgggcgacagagtgagatctgtctcaaacaacaacaactacaacaaaaaccctcaaacaaaacaagaacaacaaaaagaataattcagaataaataaatctcttcaaatattttagagttcgactctttgttaacaaaacaragtcataatttccaccaagaatatcaacccttctctatgttataaataaagtttcagtgccgtaaaagaaatagcacttgaatgtaaaattttatttttaattctcagcaaggcaagctacttctatagaagggtgcgcctttacagatggagcaatggtgagcagcacacttggacaagggaggggaargggttcttatccctgacacacatggcccctgctgctgtgtccttcccctgttggccagggttagaccgcacaggctaaactaattccgattggctaatttaaagagagtgactgggtgagtggtttggtgggagaaatggttatgcaggatggagaatgagtcagggcagagcaggtagcaggtaatcggaatgagttagagtggagccrgtaatcgcaatgagtcagggtggagcaagtgattgaaatgagtcagggtggaggaggtaatcgaaaaaggttactttacgaggaagttaagtttacaagtagaagacaaagaattgaacatatactgacatattgattctttgaaaagaaatttagaactcatatctaacatctgttttagtataaattcagattttttcattgtatatggcatttggcataaagattatttgtagatcctgtcattatttaaaattatattatatatattcatatgtttattataccccttcctgttaaatataatctccatgaggacagggatttttttttcatcttattattcatgctgtttccctagcacagtgcctggaacataataagtgcttcacaaacacttactaaagaggagagttatttatatcaagaaattggtactaaataaagtctattagaaagagaaaattatttaactagataagaaactcattctaaagaaaacaaagtctgaggcataatgacttgattggatttagggagggtaattaggactaatgggagttttacccctgattctttaggaatgagacagaaaatgagaagttaggaataaatcccctgaaggctttggaaataattaactgagatctttcttttgcaatgatgtcttatgtttcaaagatgaggtgtaagatgagttgggattatgtttacgtttcattttccccacttttaaataattttctttaaaagagaakaagaaatagattcacagtttagagaaagtctatggaaaaaataatagaaaaatcctgggtgaaggataaactacgaatttcaaaagataatgcagctatctaagtaatagacacctaagtaattggtagcaagtaaataaggagctcagaggctatcagataaaccaagtgaaggaaactgaaaaaaccaaggcgagtacattgccaagaaaagaaccacagatgtgattcagcttgcaacatgagctccaaaggtttaaaaaaaatcaggaagtttttgggggacgatgtagtaagtggagcaaacaaaggagaagtgggtggaattttaaggttgaagatttcatgataataagttattggacagtaagaactttggaatggcactcaaagagaatatgagtcatcctaaagcttaaagagattttttaggaagatgtgaaagtgttagggattggaggacacttgtcatgtcgaaaatcttagaaataaactggagttcattcattctttcattttgcatttattgagcacaatccaggaactgaggacacaaaagcaaatgaatcaggccaaacaccatcccagctttcttggagtttacagatgaataaatcagttcatctcactgatgcacgagtatattcaagtaggtatttgctgggaagaaatgcagggcgaagagtgactaacaaagaaaccaggcctagatgtggtggggatgggttggggattcagggggccttccaaggaacacacttgagctgagatctgagggtgcctaggagccagctgggggagaaacaggggtagcatggaagaaaccttctagatagaagtcctgtggaggaaggatcacggcaccttcaggaagcagaaggacgatcagcctagctagagaacaaagagtcaggagaagtcatataaactgaggcaggagctgtgggcaaagctactttaggcagacccgagggtcgcaggagttatttctcccaagaacaaaaggacatcacaaggtgctattagggagggactgagacgtgaccagcagctggactctccagataaccaaaactcacccatttggcagcaataccgtccatattttaccacctttgatggccagaagtctggattagggttgctcattttccctctatcccttcctggagcctctgtggttgaactcttgacgtttccttgatgactttgaggtataaaggctgcttatccttgggctcaggaatcccaggctgtttttctcctttgagtcttgtttccttttcaaactttttcatttctggagggtgctgccattgtacccgtgtctcttttctttcctttatttatttatttattttttgagacggagtttccatctgtcgcccaggctggagtgcagtggggcaatctcggctcactgcaaacctgcgacttccgcctcctgggttcaagcaattctcctgtcttagtctctcgagtagctgggactacaggcccactacagtgcaccactacgcctggctaattttgtatttttagtagatgcagggtttcaccatgttggtcaggctagtcttgaactcctgactcaggtatctgcctacctcaacctctcaaagtgctgggattataggcatgagccactgcaccaggccctgcgtctcttttctaattggatgcatctgatatgctgtaggatgaaaaatagaaaactcaatgaattggcttcctttgagctttagagtgtgggctttatggtgccttgggggcctttgacatttcctcctttgtcccactaataccccaggctgcagggggcttagagtaagcaccagctggtatctgtgctgctcaatacggtggccactagccacatgtggctatttaattttaattatttaaaattaaataaagttaaaattcagcccttagttatgctagctgcacgtggccagtgcccaccatattagacagtgcagatttggtttgagcatttctattgctgtaggaagtgccatgggcagtacagtcttagagtactgtggataggatggtctacattattgtcattgatgctgttgagcatcatttgacagcaactccaggcatgctccaaatacagaactggatgtggcctttcttattctgctaagcttacaaaaatacatcctgtaacttattcctttcagaattgttataattactgtaatgctattgaagaaatgctcagagatctatttccagcagagaaatggrctcgaagctaattaaaattctacatttgctcactggaaaatttgagctcttgctggattcaccttcccacactgtctccaaatagaatacaagtcacacacgtgtcgtgcagccttaatctatttgagacattccatgacgccacctgagccttcatcaatttatacttcaacctcaggagaaggggtacattcagggacctgagatgttggcacaaacagatgctcattaaaaaaaaaaaaaaaatcccagctcattgaactgatgagctagttatcctatgttctgaactcagaatagcaaataagaagatacagatcgaagatacttcagctgaatgttatataaaagtcatgtcaaggtgtgatgaataatgcattagtgattccttgattttcattatgtgccagcttgagaatgtgattcctgcctagagatttccataataataacaatagtaatagcatttttgcattaccactgatccctgtagcaactctgcaaggtaggtagcattttccacatcttacagacgaggaaactgaggctcagggcagtggggttggtggtgcagcaggagttgagctccaggctgatttggtggggccgcccatcatcagtgttggtctgcaatacacatgcctctgtccccagcacctggggcggtggggcaggtgagtcaggaagacagagaggcagggttacagagaagacctcaatggcccaggctgatggcatctttcctggcagcttctccacacactggcccctctgatggctgtgtggatcctgtggactgaaccttgacttttactgacaataaaacaaaaaaagcaaaatactgcattttttccctagcttgtggtcagtggacttaacatgccacaagcttcaaagagaagttccgccttactgaaaaacaaatgagcaaatagaaacacacaaagaacccctgcaaaaagtctctgggatgaataggaacagcctgtcacttactaatgtggtcattttttatattaccactgctccaggagtgaagtactgtctatggcaaggctgggcttatagaaggctctaaggcttcccctctggggaactcagctgctaacctcatcaatatctcctgagcatctctcatgagccaggcactcacgattctaagatgagcgagacacagcccttgaccatgaggagcttgtgatcaggactgggagwtccacaggtgagcaaataattaaaacatagcaggataaatgttccaatactcagatacatgaagtgcaaatgagaaaagaacaaaatgcacaattccagccccaaattcaaagtcagagcaggtcgaacggggaggcaagctcagcaatgggataagatgaaaagtgggctgtaggttgttgggtggagctgagaaaatacctccaaggcacctgggacactggtgcccattgttgaggccacagggccattgcaaggctggcccaggaattaatttagaacaataggttaaaaagccatgactcattcccccaggggtagaatcaattttaatgatcagtaaatatctatcaacaaaactgaaagagaagtgaagaaatgggtcagggttcagaaaataacgttaagagacgagagccatgaacttgtccatcatgggcaaaattgggaactgcaagttctatgcaggaaagaaaaatagaggcatgaaccagggaaggacccagagttctagggcacagagaataaacataaagttcgtccaagggccagagggatgctaaggaaaaggatgaggtgaccaaagggactcagaactacaccctagctggaggtgcaccggccaagatccaccccgggctgaaatctgaatcactgggtccaacaacctactcagacaattaataaaactaatttctggtgagaactagatgtcctcctttgcactcccaaatgggggacttggtgtgcttgtttcagagagagtgtaggaggaggaaaagaagggaaatgactccacatctcagcgagatcagggagacagatattcgggaggaggtgggagaatgaaaatgactgggaacaggtgggctaaatcggtgaggtgtgtggggaagaagctaagttaggagtgggcggctggtttttccaaaggcaaagatggtgtcttagttgggagcaggaagagaactgatttctttccataaggctgccatgcagtctcctccagactgcataagggaaaatgcaggtagaagtagcactcgtctgctttcaacaaaagatgaatattgcatgcactgtggcagcagccccacggcacctgggaggctttgttcctttgtatctcccatatttcataacagccctctgtaagcagttttttgttgttttgtttttgttgtggtttttgtttttgttttgagatggagtctgtctctgtcacccaggctggagtgcaatggcatgatcttggctcaccacaamctcccgcctcccgggatcgtgggattttcctgcctcagcctccgagtagctggaactacaggcacccaccactatgcctggctaatttttgtatttttttttttttagtagagacagggttttaccattttggccaggttggtctcgaactcctgacctcaagtgatctgcctgtcttggcctcccaaagtgctggaattataggcatgaaccactgtgcccagtctgctgttgatgaactttcatcttgacttaacaaagcaatgacaatgcagggaggcaagttcctaatgatttycctttatcaacccccaaagagaatcacactcttttccttcctgcggcatcaaccatctcatagttaagtcctcatgagccgagcaaagtgttatgtaacaaagacagaatcccatgaaggccccaacctctttagaacaagatatgcaagctttcaggagaggacccaattagtgtgggcaatagtcagtcatccaatattctatacaagcaagaagtttggcgtttaatttggagactcttgcaaaaggacttggatctgcaaatacttactgaatctctgagctagactctatccccgggattcccgtgactctcttgcaaaaggacttggatctgcaaatacttgctgaatctctgagctagactctatccccgggattcccgtggctttagtggtgccaaccagagttaagtcctgaggatcagagtgtggctctgataataaaaaagagccacatgcggggggctagagctcaggacatatttggcaggatctcaggaacagaaggcaccaagcaatcctataagagactcatcattaatgcagcgagccagcaagcctctttctcagtttgttctgcagtcctgcagggggccagctgtgagtcttatgtctgtctcgtacctctccacaggcagcttatgtgcactgaaatgccagtttcaaattatccaaactgatgtgggtgcccagatgtgaacactatcttgtaagcaacacgaatatgtggacaccaaaagttatcatagaatgagtatgccattgggatttccatggaaaaaccaggagattgcgggttttatcaacattkaaaccacacccagtgtgaatcaattcccttgcttatggctaaaggtagattccttccctggcatggtctcagtatctacctcaagaacacagctctttcccatctcaaagttagaaaacacattggtagactcaatatctagaaccttagtgtatctgcaaattttgaattccttccatagtctattctattctttttttccaattgtttattgtggtaaatccattattttaaaatttatcccaaagctctattttctggctaaaacccatggcctacttagagcattctgccgtcttttcactttcagaataagcataatttatttagggatcttttactgccacagaatattctatttttccataacacccctccagaggtaccaagcagaaaaacagtgaatcctgagttggagatgctaagcagtaagcgaggttccttcactagctaaatgattcactctcaccctcaaacattgctcttgtaccattctagtccatgctccggtggaagtacaaattattacatgtcacaggtttggggggttgttcaaagatagtcaaagctgggaacgttaaagctcccaatgccaagcatccaacgtgctggctgggtgctgttattcatcctgcccacaggaaggagaaagcttctttgtggaagactctaagcgactcatcgtgtgggctgcctgacataaaacgctgggcttgtgctccgtggtgagattctctcttgcccgctgtttcccaggtttggtaaactaaaaacaacgcattggcctgctagcttctgttcggagggcttgggaactagatgggagagtgggagtggttgtgatggttttgacaactatagaatttcccagctactttgctttgtctaccagcataagccaggaggagctggagttacacaccaacatgagaatatttgtcctcagtccttcctgccacttatcaccttccctgggtcccsgtgcacagcgactcactggacaaactcctccccttcctctgctttctcggccattctcctttctccttccagaggatccctagtgtcgtagaaaatctactctttgtttttagacctaaagtagataaactttaaagaacttcttgcaaagagttaaaatgttttwtatatatawatatatatatatatatatatatatatatwtaaagtaactttatatatatatatatatatatatatatwtttttttttttttttttttttttttttttgkggkgggggatggagtctcgctctgttgcccaggctggagtgcaatggcatgatcttggctcactgcaacctctgcctcctggatttaagagattctcttgcctcagcctcccaggtagctgggattacaggcgcgtgccaccaggcccagctaatttttgtatttttatttagtagagacagggttttgccattttggccaggctgctcttgaactcctgacatcaggtgatccacccgccttggcctcccaaagtgctaggattacaggagtgagccaccgcacctggcctaaaaaaaaaaaaaaaaaaaaaaaaatttaaaaacttagtccaaagtagaaaaaaattacaaaccatgtaaatgaagaatttcaactgtttttagtattttgcctgtcttatttaaaacaattctctagcatcaaattattatgtccatagataattacatatgtagccctaaatagccaaggactttaatcataaaattatttaaaatatagttattgaggttaaggtgggaggattgcttaagcccaggagttcaagaccagtctggccaacatagtaagactttgttaaaaactaaaaataaaaaacaaagaatagttattgctattatgaggaaattcaagtcgttgataaagttatgttttcacatcttcccaccttcctacctcctacgcccctccaagaaaaatctgacgccagtttgcatgtgttgttataacctatctttatcctctcagccttgtttttgacaagagcttcctttaaagacaaatttaggaagagattccattatgttattagaatctcgtccagaatcacatctattttcaaaaaattttttcttagctctgtttagtgatctcttaatgatgccaaacaactgtcagaaatcatattgcaaagcctctcataaacgtaccagtcrgttgtctttaagttaccatgttgttactcctccagagttttgatgattttatttggccatgaagatgacgaccagcgtgtgcacctgtggtctgagtaagtcagtgggcctggaagattaatgagcttggcccaggctggcttgggaggcccagccatgaaccctgttgttttccaaggctttgcctgcatccggctggcatttctaatcctgccgtggggtttggctccggttccctcccttgccccccatcttatttatcaatagcatgtgaattagagcagaagctaacggacagacaatgagctggaagcgaccaatccttccaccttgggaggacagctgtgtcccagaggcctggaggcaccacgttccctacartgatttggttttcagtttttagggtcctgcgcgtcatggtctgataggacttttgactgaatatgggaagggatttaggagtagacaagaataagaagtcgaatgttcacatttttccctttcccctcccctcccctcccctcccctctcctctcctttcctttcctttcctgagacagagtctcactctgtcactaaggctggagtgcagtggcaaaatctcggctcattgcaacctctggctctgggttgaagtgattctcctgcctcagccttccaagtagctgggatcacaggcacccgccaccacgcctggctaatttttgcatttttagtagagacagggtttcaccatgttggtcaggctggcctcaaactcctgacctcaagtgatccacccgcctcagcctcccaaagtgttgggattacaggcgtgagcctccgcaactggcctgtgcaaatattttcttctcaaaaattctggaagcaatctgcaastaaccaaatagtgctcatgatsgtttgggagcttgatgtcctcttagggtattttttgtgtcattagcttcagaaacacaggaatataaagaacaccatttatcatattgctgagcccagcagctgtttgggtaataacctctaaactaaagatgatggcacttgactacataagcacccatcaggttgagaaggaaaatgaccacatattctctagctgttggtgaagttaaccagggaatgtatggacacacacattctttttgaccattttcaccaaygtaattgggaacaaaacaaatcagtcattttgaatttattttgaaacaatcatgatttcatgtattgtgaatcacttttgtacagcagagctgatgtgtatgtgtgtgtgtgtgtactttaaaaaccttaaaatacagaaaagccttgctgttcattagacatctggcatctgctgctctattccaagtgattaactcatctgcaatgacttcttacccctttgaataaatcagacactgtcactggctgcaagaatggtgatggtaaccctgtattctatgaagcaattatctaatgaactctagatatttttatgtatttcagaagggacttttgaaaaggtcttccaacatttccatccctgacagccattagtagcaaacmcacacacacacacacacacacacacacacacacacggaagaagcatccacatttcacactctctatccctgatgttctgctgggatttgacagacggaaacacagcagtagtttgcaagtgactgccaaatggggcagccagactgagcagggcgagaagaggtgttattcaattgctggaagacagatgctcttctccgagcctctgccttctctccagtagccattcgctgacaccactgtggtgccacgttgcactcgccaggtagaaggaactggagccagaagcccaccctcaccacctagggaagaaagctctcagcttcttcattttgcagaggacgaaatcttgatgcatagtgggaaattgamtttaccaaggacayggtacagcctccacccccagcacagtgctcaatccatcatacttacaatgatttattgccaccatagaacctaagagggatttaggatctgtaagcccttctgtcatcaatggtttctaaaatttgcactaaagagggaaaataaagctccattttggttaatgtgcattatttatttattttttgagatggcatctcgctctgtcgcccaggctggactgcagtgctgctatcttggctcacctcactgcaacctccaactcctgggttcaagagattctcctgcctcagcctcccaagtagctgggattacagacatgcgccaccaccacccctggctaatttttstatttttttagtagagatggggtttcacaatgttggccaggctggtcttgaactcctgacctcaggtgatccacacccttcagtcacccaaagtgctggaattacaggtgtgagccaccgygcccagccaatgagcattatttttggactctgcctctctccttgggatagagataaattatctgtcygttgttttcttttcttcccatggactttatccagttcctgcctttgggttattgtatttcggaatcttattatttttaaaagagaaagaaactgaaattgaatcaggkcctttatcttgctatctcccaaactacttgatttaaaacctgaacactaagctgaccgatctstctgcttgctctaagtaaacaaaagaatcaggaggcctgcagtgagaactcctacagctttggctgagaccatcaggctctgggaacaggggtgtgttctggaactcctagggtgactgttttagctccaacttcccatggggaaaatgattgccctgttttccattctaatgctaatgacctatctttgggagttcraagctggatcaacagtcagactgacttcctatttctaattttcacactcagcctactttgctttttcaccagacccactctccaccttcactaattttaggtaaaaatttatagaagtcagctgggcatggtggctcacgcctgtwatcccagcactkwgggaggccaaggcmsgtggatcatgaggtcaagagatcaagaccattctagccaacacagtgaaaccctgtctctactaaaaatacaaagattagctgggtgtggtggtgcatgcctgtagtcccagctactctggaggctgaggcaggagaatggcttcaacccgggaggcagaggttacagtgagctgagatcatgccactgcacgccagcctggcgacagagtgagactctggcaaacaaacaaacaaacaaargttacagaagtccaataaggtttcagataccatgctagaccttttccaataggaatgaaaaagtaatacccacttccccgccctgctttttctcttcccacattcaaaatcagttgagttgggcaattgtattactgaaaaaatggagaattttttctggagaatgatgcttcagtctactggccaagtgggcttgttaataccatgtccctaaatgagatatactttccctgccatggacagtgttactgctaaacaactacaggccaccctccttgagaactggccaagagtgtgcactaactggtacattctaagagatggaggagtaaagtgctagactgtgttcagctccttctcccagacttttttattttttatttttacttttatttttatttttgagacggagtctctctccgtcacccaggccggagtgcaatggcatgatctcggctcactgtaacctccacctcccaggttcaagcgattttcccttctcagcctcctgagtaggtgggattacaggcacccaccaccatgcccagctaatttttgtatttttgtagagacagagtttcaccatgttggccaggctagtcttgagctgaccttaggtgatccgcccgcctcggcctcccaaagtcctgggattacaggcgtgagctaccgtgcctggcctcctcccagacttgacaatcggttgccacttagcctctttgcctggggtagagtttataaaaaagtggagaggagtctggagcaagactctatctcactagcaggaataagggttcccctaccacactacgtgcttaattgggaagggccaagactcccctcaccccaagtctctggaccctgagtctagggttcggtttactatatttatcccactgtaacaggtgacagcaggagctctttagcaataaataaaaatctaccaacactaagaaatctgctcttcacttttaaaaaagagaaaaataactgtaacccttttagaaaactatctctgacttctcagtctgatctaacttctttatttataaaaggtataggagcattttcaaatcacatgcatcagattggaaagagtttgaatctacagtttgaaaaggcttggtggacagccccaccattgcttcatccagcatatgtgctctgggaagtattgcagttaaaaaagcagggatgacttttgtttgttggaacaaagcattgaacaacttttttcattagtaggattggatttccacccagggtgggtggcaattaatgatcaggatttgtgacatggttttcagcctgctgaattcactgctgaagatgcaaagctgaagaaactgatgcattcaaacacggaactttccaccttctgtcaactgacatcatcctgtaggcagctgcaaaccaaaagaagtaagctctcaactggattgtctaatgcagctcatttaaaactcagtagtagcttctatcttctgccctgtcagtgaatgctccctttgggataatgccctacatctctgacatgctggttacacaaatttgtccactaagggtgtggaggggaaaagttcaatgcacaaaagaggcagacaataagtagactttgcttctagattttttttaagatagttaatcaatagtgtactttgtacatgttcctttttttaggaaaatcctgtctttaaaaaaataattttttaatgtaattgttttaaatttaattttaaaaattaaaattaattttaatttttggtgatagtttaatgctgacaaaagtctaaatttcccattttccaatgagttaacagacatatacagagttttatacattttgcctgcaactcacccaatttgtcacgtaattttgaattttaacatttcaaaagagttcattaaacaaatagactttctggggaaggactggattggtgtttgaaattggctaaacaaacactcggggatgtcatacattyctgctatgcagatgtgtaggacatcatgtagttcatggattggacattaccttaaacccatgggcactattaaatagaataggtaactaagtcatgacggatgctagaaatcaggactctgctcagttgcaaagtggctggagggccacttttttaggctcaacctatcactccccatctccactgcccacccctacacatgattcccaacatatgtcgttggtcttgaaaccaattctcgcttttttggctcttaactcacattgcccctctctgggaagctcttccttcatcccatcacgtaagggcatctcatccttgtcaaagagcttttcatgatcacactgcttccttaatctctgtcttctcaaagccactgcaaaacctttgcctgtattacaatccagcatatcttctctctagctcaatgacaaatttattggaagcagaaaccatgtcttttatttattacagaatttttgagctagaaggaatctcatggtaagaacgaacttaccataggatgaataaaagataaatgtagaaatactagataaatgtaaagaccaattcaaggtcacaaaatcattttacgtaagcctgcttttcccctgatgtcccaatttgaagcttgctgataccagttgtataaatcacaccaaaagacaatcaggttactcctttgaaatagggaaaaatacaacaccaaacctgagttcataaagaaaccaaaagattaaaacaagaaaggttatataactggaagaaaagaaactgatgaatatcaggatacctactgctctcatatcaggattgtttctttattttattaatgtgatggcaaatcagtttgaaaactgtgactatataaacaagatgaacttagatcgagtgactacgattatttccagagtgcaaataattgctatccgtattcatcagtgtgttacagagaagcagaaccaacaggatgtgtgtgggtagatggatrgatagatrgatggatggatggatggatrgatacacagatagatagatagatagatagatagatagatagatagatagatagatacagatttgattataagaaattggctcaygccattatggaggctgacaagttgcaagatcttcagcgtgagttgagaatcctaagacccaggagagctgatggtacacattccaatctgatggccagcagggttgagacctggaagagccagtgtttcactttgagtctgaaggtggaaaaaagccagcttcccagttcaaaggcagtcaggcaagaggaattctcccttacttaggacaaggtcagtctttttgttctattgagtccttcaactgattgactgaggcccctacccactttagggagggtgatttgctgtactcaagtctaccaatttaaatgttcagctcattcaaaaaacagcctcacagaaacgcacagaaggtttgaccaaatacctgggccaccccttgatttagtaagctgacacataaaattaatcatcacactatattttatatcaagtcaaatttatctttctcacttcttgaataatagtgaagttttcagattctataaaattgctttgcctatttgcatattttcctttcttcctttcttccttccttccctttctttccttctctccctccctccctcttccttcctccttcctccttctttccttttcttttttcttttctcttcctttttctttctctttctttttctttctctttctccctttctttctctcactctttctttctttctttctttttctttctatttctccctttctctctctctctctttctttctttttntcattcactctgtcacccaggctggagtgcagcaccaagatcatacttcactgcagcctcgaattcctgggctcaagctatcctcccacctcaacctcctcagctgggactagaggtgtgtaccactatgcccagctctttgtatgtttttgtaaagatggcgtctcactatgttgcccaggctgatctgcaactcatgggctcaagtgatctttttgccttggcctctcaaacttttgggattacaagcatgagtatcgcgcccagccaccttttctttcttatggcttaaacacctatgtttctgactcatgcctgacttacgctagtgctgatggacagaagtttcatttcatttccatgtaaaactatgaattgcattatttaaacacagatttgcttataggcattttagcttaactttagcggtctctagaccctgtattctgtggtatacaaagaactcttttgtctctattgagtagaacagaacatctgcaaatatatttgtttgccctgagaactgtttgtggccatgcaatatgttgtttaaagatcttttatcaaaacattttacttagtagatccacatgaacatacacatacagaaaatctgacatgagtgactatttatagaaccattcctttagaaaaggactgctgagcatttgatggaggtggtagaaaggataaaggggaggagacttgactccagcttctgctctgactctaaatagttgtctgaccttggacaaatcattgtgtcatctctagtgatttctctggtcctagaaatctctacttctataaaattagagattattttttccttcttctcatggttaaaaaaaaataagagattacacaaatggggataggaaaactatgcgtatttggaaaactctggaaatttgcaccatttaattccaaatcaattgtatcatcttttttttgtttctgtttttctgtttgtttgctttttgagatggaatcttgctctgttgccaggctggagtgcagtggtgcaatcttggctcaatgcaacctctgcctcctgggttcaagtgattctcctgccttggcctcccaagtagctgggactacaggtgcatgccaccacacccagctaattttttkttttttttktttttttttttttttttgagacagagtttcactcttgttgcccaggctaaagtacaatggtgtgatcttggctcaccgcaacctccacatcccaggttcaagcaattctcctgcctcagcttccgaagtagctgggattacaggcacgcaccaccatacccggccaattttgtgtttttagtacagatggggtttctccatgttggtcaggctggtctcaaactgctgacctcaggtgatccacctgcctcagcctcccaaagtgctgggattacaggcatgagccaccacacctggcctaatttttttatgtttagtagagatgggtttcaccatgttggccaggatggtcttgatctcttgatctagtgatccacccacctcggcctctcaaagtgctgggattataggtgtgagcaactgcgcccggcccatatcatcttttaaaatatactttcaattaggttttgtgttgtttgcttagagaataatatgaatttttattttattttttgcagtttgtgagttgtcatagttttcccatgtcaaattttttacaaaataatccataacctaaggtattagattaagtgagagcttttcttagtactacctgagaactaactctatttttcatcctacgggaagctggatttgacagctaatggatctgttttgttctaaaactaccatctgttccaaggccctttttaaggktttaatcatcaccattatgtgtgagatataaatatatattcataataattcatttcaaagaaaaaggtaaaagcacaattacacttagacgtaaacgatatatttaaacaagtgtagctcagtttaaatatcagcaaatgaggaaatttaatgtacccactgaccctctagctataaacacatttgatatctccaaacactaaaagaggttcttagtgcaacagaattataggccatactggaggttataatactacacacagcttccaaacaagtgtctactaatttcaggagctgctatgcagcagacgtgagtgatccctttaggggcagctctcagggacacagttttcttttctaggcagcggcatgtcggtactgctgctggtacgtgctagcattcaaatcttgggctcaggaggccaggtgcggtggctcaaacctgtaatcccagcactttgggaagctgaggtgagtggatcacttaaggccaagagttcgagaccagcctggcaaacatggcgaaaccccgtctctactaaaaatacaaaaattagccaggcatggtggcgtgtgcctgtagacccagctactcaggaggctgaggtatgagaatcgcttgaaccagggaggcggagattgcagtgagcatagatcacgccactgcactccagcctgggtgacagagcaagactatctcaaaaataaaataaaaaacaaacattgggctcagattcagctctacgccttcacttacccaacttgtttgttcaacccttcctccaattctgtcattcaattaagtcttccaagataaattgaccaagatagttcaaactgggtttctgccctttgtaaccaaagaaattccagactgatatataacatatcaaaatatagctttgttctactcctttatctttcatgctccagccaatctgttaaactaatccatsgtacaaattcactaggtgtcaataatgtcttatcccttccaggtaacacagatgccttttaagcttaacctcaggaggcatttgccttcatctgggaaaccccaggtggtcggtagtaaggagatttggggcagagaaaagatatgttccattgttctttagtgattttggtataagtacacctggtgcgagtctaaaacagagttgctttggtgagaagagagaatctgttttcctctatccctaaactgagaacaagtcatgraagaggcttcgggggccatctgggtagcagacatcatggacaggaagatgctgtttgaccataagagggcagttcttggaaagcatgcaggatgtgcaggcccgtggtttaatgctgggggatagctcccggacttsagttgaacaggggcacaggagtgggtaataaggggatcattccagagggggaaatggccagtagaaaggctgatgggccagggggcctgactcagtggcctgcagagtggtgagattgggggctgtcctaatgactgggggtgagttaatgaatcatgagattgggaacttaaatgtaggaagcatgtgatacaggcatctgaatttgacagtggcttgaacataggtttgtcaatggagaaatgtcatgatcgaaatgggatttatgtcagattgctctctaggctgtgtaggaaatctaagtctgtagagtaaggccaacagaagagccccagacataagactattgccaaaattgcaggaatatattggaaaggatgggtcaagaggatacaaatacaggactcagcaatgactcactattggggaaagagagagaagggtgggatagaagttgactcaaagtcatgagcctcaggaactgagaggagagttctctgtgttgctgtttgaagatgggaaggagggaacagggagtaagagaacccaacactaaatatttaagaaaaaagattcaagtggtgctttgaaacttggtagttcttctaagataagaattccaaaagggaaaaggaacttttaattttttttttcctcactcactgactattcaacaaaaccactggacaggaagagaattgagtctccctggccttcttctaggaaatatctaaactactcaactcaggtagctcagtaaggaaattatcttataggagttttttttctgccaagagacttatatagatattctttatcattcttgctctttctgtgggaagaggggttgtttgaaaaattaagtaaatgatgaataatgatgattaggaacaattgtaaaagcaagtgaggcctgacctaaattatttttataacatattctcatgatctgcagaaaccattctaagttttaggcaagggagaaaaatgtgaagtccaactgtctggtttttgtaagtgcagagttgggtatgaatgtatcagacccatgaattatagttgtgatacacagtctctgaccccaagaaattctttttcccactgctctctagtctttcagtaggagtggccacgttgtgtgtcatgtgagcaagccccctcagctgattggagcctggtgaatcagctgacccaagggcagccaatccatgaccaggaaccaggaagaggtttacaaagattctctrcctagacaggggcaatggtgattgagtagacctatcagattatttcttttggaagtttttctccttaaaactcaaaagagtccatctgaaaaataacatctgcatcacttcaaggttcacttctacctttttgctctctgttgccagttcaccagaagcccctgtgatgattactattctttttttttttttttttttttgagatggagtcttgctctatcgcccaggctagagtgcagtggcacattctgggctcactgcaagctccgcttcccggattcacgccattctcttgcctcagcctcccgagtagctgggactacaggcgccggccaccacgcccggctaatttttgtatttttagtagggacggggtttcaccgtggtctcatctcctgacctcgtgatctgcccgcctcggcctcccaagatgattactattcttgacttactaacaagttcagccagatttctaggctggcattaccagcagaggtgggtttccctgctgttgactggaatagtctcactaaagtctgagcactcgagcctagagccagatttatgggacacttacctacctaccttcactactgttattccctccatgcccacaaatgaagctcccagcttcaagggcacacaaagaagaccagtgtggcacatgaccttcttttactggcgtgtacttgagaacgccagccacaacatttctctcctgaatgttgccagcatcagtcccagaaccagggtcaccatcctcgtaactgtcatcagagagatgcctgctgcagctcagatacatcwacttctaaaaaggaacatacgattgtcctgtgactttttgtgtagtagtgtaaaggggacctgttgccattagctgatcattaaaggagcgactcgttcaagatgcagctctttctatcacaggtayaatttcatgstcttgctatcagatcagagcaatcatcgttgtcctcaaaagcagtgagccccacartggccgcttttgtccagccattcagccattagagcagctacttcaactaccttcacaggcttgatgggtgaattgcctgctttgcactaaatggcagttctctgatgctgttgtattaaaaaaaaagaaaggaagaaagaaaaagaaagaaayccttcatcctgccccagagagagtgcaaagtgcctttcttgattcagctgtttgccttccttcaattccaatcagtctgtgctgtgtggtatgacagwgacaaggtgaaatccctgctgagcagctctgaaatctgtgaagaaataggcttcatacacacattgtttggttgaacaagagaaactactggaatttcagaggaaaagccatacctatctttagtgactaaattagaaaaagtatggaatgcaaataaaaactacaatgagataccacttcatacccattaggatggctgtgtaaaaaacaaaacaaccacaaatattggcagggatatggagaaattggaaccctcccttcattgctggtgggaatgtgaaatggtacagtccttatggaaaacagtttgccagttcctcaaaaagttaaacgtagaattggcatatgatccagccattctacttctaggtatatagcccaaagaactgaaaatagtgactcaaacagatacttatgcaccagtgttcatagcagcattattcacaacggccaaaggtggagaaaactcttgtccatcaatagataaatggataaatgtcatatatgtaccattgaagattattcagccttacgaaggagtgaaattctgtgtgttgcaacatgaatgaaccttgaaaacacgctgggtgaaataagccagacataaaatgagaaatattatatgataccacttgtctgaggtatccagaagaggtatatttgtaaatggaagacagagtagaggttatcaggggctgaaggkaatggggagttattgcttaatgaatacagtttctgtttgggatgatacaaagtttctggaaatgaatagtcatgatggttgtaaaacaccatcaatgtacttaatgccactgaaacgtrtactttaaatggttaaacaaaagtacagaaaggtcaggcatggtggtaggtgcttgtagtcccagctacttgggaggctgaggcaggagaatcacttgaacccaggaggcagaggctgcagtgagctgagattgyaccactgcactccagcttgggcaacagcacgagactccatctcaaaaaacaaacaacaaaaaaggatagaaaggccaattctatttgattytatttgctcaattccttgccaagagcttaggcatctctgttcccaataccatcttctggccagggatttgtaaatatattaccttgtgcccaagaagactagacactcagactctgtgaagctggtttcactgatgctgtggctctaggaggcaggtttcagtggcccgcccaggctgccttgcagaggcattaatatactctgcaattccgaatgtcttcatacgtttttccaagttcaatcaaatatgtgtccatttttctgccttcccttctgggcaggtcagttctgctggggaatgtgccttctccactccccgagaatccttttaaaatgagcaaaacgtgggcctgagcgattcggccctcctagctggttcgcacaagcttagagtatgtcttttgtttctttctacccttgacaagcgtgatggcyttgctttcatgctgactttcattcctatgatgttgaaggtaacaggctgtctgctggtcccatcacagctgagttttattttaaactttaatggatagcaatgctatatacccacatgtgtccttatatattgttctagctgcacatagataatccttcctaatttcactcacaattataaaaggggtagccaaacagccctgggacaccgcccctttctgaaaagggaaggcttgtttctatatctagctgagtgtgacccacagtcttggggaattaagatactgaaaatcttgagggataatcctagttcaaagaaacataaaataagagaaaaaaagacaatgaaaatcagtttcacctgtggtttctacactcagcaaacacctgtacattgtaactattttgatcagataaaaactttgatgttctgaaataactgtcagatttctgtacgggtactaaatgctcaaaaagtccctgttggctgggcacggtggctcacacctgtaatcccagcactttgggaggccgaggcaggtgkatcacctgaggtcaggagtttgagaccagcctggccaacatgatgaaaccatgcctctactaaaaatacaaaaaaatttagccgggtgtggtagcaggcacctgtaatcccagctactcgggaggctgaggcaggagaatcgcttgaacccaggaggtggaggttgcagtgagcccagatcatgccattgcactccagctggggtgacagaatgagactctgtctcaaaaaaaaaaaagtccctgtttgaaccatatttacaaattggaagtaaaaccacatatgcctcaggaagcatcaggctaacaccatttgtcattttggtgtagatgattcagaacaaatgacaatgcttggaaatagtgctataatacagtgaggatacagccgtgtcaagcaaacggagtagacccaaatgcatgggagctcctttgctttttgccctaattcttcctccctttcatggatattaggaaaacaagagcaacccgccctcatttcaaatgcatttttccccttcctgctcacatcacatttttctagtgtgctgctccagaatctgccagcatggattctgacaggttggcgtctgctggtgtttgatgtttggcatttctgatgtgacactggcttcattttatgcaagaatttgtattccgcgtagcttcccagggtgggttaagaaagggtagggctttggattgaaatctaacagtgggaggaaaccttgggtacactagctttttagctgactgttagtccatttattaaatagcagttatcctgtatcattggtaccaatgtgaatattaaatcaattgggccattccacagagttggactaaagctacatgaaatgtcaccagacctacgggtttaatgagaagagcatgttgttcctaaaaaacccaactaaacgcatgttggaagcaatatgtaagcttatatgggatcagcttcctcataatatcagaggggaactaggattgtattggatcctccattcctaaagctcatttattcccttcagagagtaggacaactccaacctgtttcattcagattccaaggccttttccttcatagaagaataagacatttcctagaattctatgtatatttctagattgtgcaatcagaatttaaacaaaataattaaacccttcaaaaacaagtctggcctggtatggtggctcatgcctgtaatcccaacactttgggaggytgagacaggggatcacttgagaccagggttgaagatcagcctgggcaacatagtgagaccctgcctatacaaaaattaaaaaattagccacacatggcagcatgtgcccatagtcctagcaastctggaggctgaggcaagaggatcgcttgagcccaggaggttgaggctgcagtgagctaagatggtgccatggcagtccagcctgggtgagagagggagatcttgtctcttattaaaaaaaaaacaaaacagtagtataatatgggggatggaaaggaggtattccttcctatatcagaaagcagttgcatatggcatggtggccatgccacaggaaacacaggcctcatggtctcctttaccactacccacctctgaggagtgtaaccacgtcttccagaccctttttgaattctcctttcatctatagccctaccacactgaaagcactcaatctctgaattctcctcccatgaggggatcgctggcagctggaggtgggcacaggtgcaggtcctgttgtctctgcctggaagtcgtcattgtgtgtttaggtgggtgcagggtacatcagcagcaaccctcatgacccccgatctgtgagggggatattatcagcttgggaacatatggaagccaggcccagatagccaggttggctgaggatttggctcaaggtacacagagagtacttgaaaccactgaatctttcagtgagtttataatatggtcccattcctctctgcttggccagttgcytgcttggcatcctccaattaaacttggaagaagtggtgaaaggaagtgaagtaatgtcttagccacaggtacaatgtgtgtcaatatccaatggaggagatgtaaatgtatcctgtatgcctcaaagaatactccgaatttactgtcagagggatattttgtccatagcatttttgccaagatttccaacaccaagactactcttctacactgtaaaagccagcttttactgccctcttcacacacaggtgtcacacacacgtacatatgcacgcaggcacactcacagccatatgctcagattaagctcacatttcccattacataagaatcttctcattaaagtgttatctcgcagtcttgtgctatctgggttccctggcagaatggaagtagctctaaatatcctgccttttaggaaatcttgactaaacactttgtgtgtttcaatagttttaagaagtctaaatgctttgtttcaacctgaaaaggcacatacgatttgcagtactattcaggaaggaagggagggagagagggagggagggaaggaaggaaggaaagaaggaaagaaggaaggaaggaaggaaggaaggaaggaagcaaggaaggaaggaaggaaggaaggaaggaaggaaggacaatcttgctatcctgtccattgtaaatgctaaatggaatggtctttctaaaatttcttaatcaccttccatctctgtaatatttttcccacaaaaagtaaatgaatatagaaatagtatccttccatgttctcagcaaatgagctcattagttgtatttagtccccagaaatggaagccacctcccgtttgtagagtgccatgatgttcgaggtgctttgcatttctctcattcattctcacacaaacttcatggagtgtgcagygtaagaacagctaatgctcatagaatgttggctctgtactaratggtttcaccaaatatctaattctcataaccagactgtggatcattatcatatgacattttagaaggaactgaggctcagagacatgacgtcatttgcctgaagacacacaatgaatggcagcattgagatccaacccaaatctgtctgaccccaaagcctacgtacttcttcctcttctgggttatgttacctcctgataaacagggaaattgggaagcactttactgtgaataccttcagctccccaaatggggccatcaatcactttgtagttcatgagakctacagggcgagtgaccaggtgttcctaagagagcctgtccctgtaaagtgaatgttaggactggtcatgccccatggctctcaaactttggtgcacattagaatcaaagaaattgtggctgggtgcggtggttcacacctgtaatcccagcacttcaggagaccgaggtggcacaggagtttgaaatcagcctggccaacatagtgaaaccttgtctctactaaaaatacaaaaactagctaggcgtggtggcaggcacctgtaatcacatctactcggaggctgaggcaggagaatctcttgaacccaggaggcgaaggttgcagtgagcttagattgcaccactgcactccagcctggtcggcagagtgagactctgtctcaaaaaaaaaaaagaaattgtttaagatttctgggccctacctctagcttcctaaccaataatagccaaccactacttctttttcttttcaaatgatccataaatttactgatttataatttcatagattcagactatgacatttccagtcttaatagtttattttgtgagtaaccgttgtcatcagatgtcttgctattaagaacttgcaatctggtgtgatgaatgagatctttatggatatacaaatgctgcaggaaggcatagacttatattcagatagaggagatgtagtgcctaatatagcatagaacataagataaatcatgtaatctggaaaatggggatgttacataaatacacattactgaggagcagagagagttaattatgaactaaaggagtttcatggcctctaatttttttctttcatttcttagcttcagatggcttctaatttacatgcctctaatttayatccctctcccctccctctctccttccctccctcctcccttcttcccttcccttccctgccctgccctgcccttccttctttccttccttccagaatagtattgcaaatagcatgtgccttttcaggttttttaaaaaagcatttagacttaaaactaytgaaataccataaagtgttccatcaagatttcctgaggttaatattataatctcaggtgaacagagtatcgagtgagtggagcttataatattaacctctgttcacttgcctttatgaggaagaggagcatattttgttttcccaaagcaataatgtattagtgtcagaattcctttttattttgttcatataaatgtagttagtgtttcaaatctgcatgtaaaaacttgtcttttaacttttatttatttagttttgagacagagcctcactctgtctcccaggctggagttcagtggtgcgatcttggctccttgcaacctccgccccccaggttcaagcaattctcctgcctcagcctccagagtagctgggctaatttttgtatttttagtagagacaggatttcaccatgttgtccaggctggtcgtgaactcctgaccttagcttatctgcccgcctcggcctcccaaagtgctgggattacagccgtgagccactgcacccggccttaacttttaaatatattttcttaaacacagttattaagcccttaacattgtacatcacgtggcttgaaatcagatttaccatcctgcaatggctccaacattagaagatttttgtcctcacagtcctcagtctgtcaccatttccagaggtttcccacatgctagtgcctctttgatactacacttccctgggaaggagagctagggaaagtaaaaacaacaataatgatgatattaggacaatttgtcatgtgaggtcacagcaaagaattagaagaactaggaaatgtttttctacattttyattaatactttaggctggggcgtggtggcttatgcctgtaatcccagcactttgggaggccgaggcagatggatcacttgaggccaggagttcaagactagcctggccaatatrgtgaaaccccatctctactaaaaacacaaaaattagccagacgtggtggcgcatgtctgtaatcccagctacttgggaggctgagcaggataattgcttgaactcgggagggggaggttgcagtgatccaagatcacaccactgcacttcaacctgagcgataaagcgagactccgtctcaaaacaaacaaacaaacaacaacaacaacaacaaaaacactgtattaatactttaacatataaaatccaccataactccatatttagatgtgcctactgataaacaggcccctggaaaataaataggtagcccctgaccccaaataaggtagtactgcttttaaaaaggtattggttttgtttctgaatagcgtttgttccaagatgtataaaactgtggctccggcatatgctgtagctggagggaaaaaagttggggtggatttaatgctacatctgtgaccagttagttayagtaacctccaggtatttggtggtttcaacaaaagttctaatacacattccaggcatccagaactatatggaagactgtaaaaagatgcggacaaataattcatacacccactaatttgcgaaaactaaaaagtgcacgtagttccctgctgacttgaaaatggtgctcaattcattcttttacaaggaagttgccgtgggtacccacgcaaggatagagcctcgagggatggtatgtgcagaygacacaggacatcctgcyggatcttatcagcgctgactgggaaaaatgcactaaattatcagttcagggagggagggggtcagagaaaggaaacattgcaacagttaccagggcctcagagacactgaccaattgttccagctagataagacactggctttggattttcacagttatttttcaactgtggctgataagctgactttcatttgatttattttcttttctcggacttatatttcatgtttatgggtggccttcctccaaaccactaattatcctctgtagtcgctcttatttgcacgatttgattgatttgctgtagaagttttgatttttgtgggattaaacaaaacacacaaatagcatgccatctgcttgatatacatgtcattcaggtccataagaggctaaccaatgagttctggggtggttagctgggtttaagttagaacacagaaaaagcaaacataaaactcccaacagatttaaaacaaattgacaaagaattcaagaaagcctagatattttctaacrttttctggccattttgtttttcttcagacagggtctccctctgttgcccaggctggagtgcattggtgcaatcacagttcactgcaaccttgacttcccgggctcaagcgatcctcctgccttggcctcttgaggagctgggactacaggtgcgtgccaccacgcttgcaggcacatctaaatatggggttgtggtggattttatatattaaagaattaatacagtgttttttttkgggggggggggttgttgttgtttatttgagacggagtctcgctctgtcgcccaggctggagtgcagtggtgtgatctcagctcactgcaacctctgcctcccaggttgaggccattctcctgcttcaaaattagcagtggctaatttttttttttttyttttttttgtaaattttctgtagagatgggggtcttgctatgttgcccagactggtcttgaacttctgggctcaagcaatcctcctgcctcatcctcccaaaatgttgggattacaggtatgagccactgtgcctggccattctggtcattttgcctcactcctttggtcagccccagtcctcasctaatgctttggcccccactcctatggtgaagattccccactctggatttccacaatgtgagccgaagcgaccatttccacttcagaggtattcaaaaattctattcaacagacatgtttcatctacctgtccaaaggtatggtgccaggctgtggtcaacggaaaaactgatttgtgcctgggtcataatttataaaggtgactaagtgacatctgagaggccaatgctattgaaagcaaagattaaagttactcacagttgccctataaacaagaggcacctcaggccatgcaaagcctggggtaagcaccagtgctgatcaggaggcagaaaggagtgagaaggccttggccacagccattactgggattttcacaggaaaggcaaggagagacaagggaaagagcctaggattggccagttggaataattccagtggctttgggacacagttatccctagttgtctgggacctagccctgggttgattcagggctgggaaaatattggcttgctgtgaaagagtcagataaggaggtggttgagagagcaggctytggatcacaggggaggtgtgagtaaccttggctgttagtttggccctgtgattaatgaagkccaaataaacaaactaagtccaaactaagaaaacacagttagggcagggatgaacagtgtcttytaccaggtattcggaatccagtagctgaaccaagtatcatgtaagcaaatccaagatatgccctgataaatgcagtactgcaccagcagcttccatgtgtgatgggagtttgagggaggcaggtgactaatgaaatggaaagttttctttcacaggagatttacatcctctttttttttttttttttttttttttgagacagagttttgctctttcacccaggctggagtgaagtggcacaatcttggctcactgcaacctccacttcctgggttcaagarattctcctgcctcagcctcccaagtagctgggattataggtacctgccaccatgcccggctaatttttttgtatttttagtagacatggggtttygccatgttggccaggctggtctcgaactcctgacctcaggtgatccacctgcctcggccccccgaagtgctacgatcacaggcctgagccaccgcacccggccgtacatccttttacacttaactagaagaccactgtcatgcactgcataatacttcagccaaccatggaccacatctatgatggtggtctcataagattataatactgtatttttactgtactttttctatgtttaggtacacaaataacactgtgttacaattgcctgcaggattgagtagagtcacttgctgcatggtttgcggcctaggagtaataggctatagcacgtagcctaggtatgcagtaggctacaccaycttggtttgtgtacatgcactctaggatgtttgcacaacaatgaaatcacctaacaacacaattctcagaacgtattctcatcattaagtgatgcatgactgtacttcaaaaccatacaaccccgctagtaagtgctacccttttgtacatcgaaggacataagtcaaggcctagcccagtgcctggcacataagaaacattaaaacaaagatagttcttggccagttgcagtggcttacgcctgtaatcccagcactttgggaggccaaagtgggcagataacctgaggtcaggagttcgagaccagcctggccaaaatggtgaagccctgtctctactaaaaatacaaaaaattagctgggcatggtggcacatgcctgtagtcccagctactagggaggctgaggcaggaggatcgcttgatcctgggaggcggaggttgcagtgagccgagatcgtgccactgcactctgcactccagcctgggcaacagagcaagtccctgtctcaaaaaaaaaacagaaaaaaggtagttctcatctctcccttccaccttgtattgctaggcatcactgacttaataaaagcctgatacaccattctctccccaaatggaggcattctttttacaattaatgtagttcacagttatttgcatagttcttttttttttttttgagacagggtcttgctgtgttgcccaggttggagtgcagtagcatgatcatggctcactgtakctttgaactcttargcttaagcaatcctcccacctcagcctcctgagtaactggaaccataggcatgtactactatacctggccatttatttttattttttagttttttggaaacagggtctcactctgttgcccaggctggagtgcagtgatgccatcttggctcactgcaacctgtgccccctgggttcaagtgattcttgtacctcaacctcctgagtagctgggactacaagcacatattttttagtagagaagggatttcaccatgttggccaggctggtcttgaactcctgacctcaagtgatctgcctgcctcagtcacttgaggcaggtgtgagccacggagcccagcctatttcccattttaaaaacaaaaagtcatatggggttaaaaaatgcttgagttaattttgatttattcttgattagctggtatggaatggtgggagaggcagcccaaggggtgcccacgtctggaccactctggtgctggccacacccctgtctgcttgaagccacattggcatccccccggtaccagcgggatccctgacagccactgccattccctggagggcaccaccgctcaagaggcctccttatgaatttggcaaagaattttataaactgcaggcagggggaagcttggaatgtctttctaccactagtaaacagcagctctttgctacggtgagtgtaacagagttgttttccattaatatgtggctttacgtgagaacaagctgacacgaggagagcaaacaattaraaatgatttttctcatgcagtaactatgcagattcaatctcctcacagtggaggtataggattgaaaaaytgtttgtcactctcttcttggtccccagcattgtaggttttgtttcagttagcgtcaaatcttctaagccaacagtaaacatctaatgcacttgattagtgaaggatgttgctatgtgactctccatcatcatacaatgaygttcacggctactgtctttgcactgtatactacgtgtcaatcaatccattcctctcttgacacagatcatttctatttattgtgctccatccctgcttctcacactttactgtatgtgagaatcatctgggcatttccttaaagtacacattccaggatctcaaaggtagaacttagaaattctgattgcatcggtttgatgaggcccaggaatttggcctttagtcaactctccctcccccagttgatcctggtgtaggtggtccatggagcagactttgagaaacagatttctagttcttggttaaaaataattatgcagggctgggcatggtggctcatgcctctaatcccaccactttgggaggccaaggtgggaactttgcttgagcccaggagttcaagaccagactgggcaacacagggagagcccgtctccrcagaagatacaaaaattagctgggcatggttgtgtgtgtctatagtccagttacttaggaggctgagggaggaagatggcttgagcccaggaggtcaaggctgcagtgagctgtgatcacaccactgccctccagcctcaatgacagagtgagagttcatgtcaaaaaaaaaaaattatgcratatagtctgtgaattaatataaagcatagcaataactaaaaacaagtkttattagcacttgttgacataaaatcctttctagatttttttcaatttggcagctttttatttatttatttaatacatattagatgtagatattttcaggatccatgtaataatttgataaattcatataatcaaaccagggtaatagggacatccatcaccttaaatatttatcttttctttatgctagggacattcaaagtattctcttccagctattttgaaatgaacaattggttaatgttaactatagacaccgtactgrtatatcaaatgccgggtcttatttcttctaagtgtatattgtatgtattaatcagcttctttttatccaaacccacccttcctggcctctggtacccaccaatmtactctctatcctcacaagatccttgccagtttctgtgtaaccactattgcctgactttctaaaacaagccaacaagagagacctcaaggttttatcgagaatgtggggttttggccgggcacrgtggctcacgcctgtaatcccagcacyttgggaggccaaggcgggtggatcacgaggtcaggagttcgagaccagcctgaccaacatggtgaaaccccgtctttactaaaaatacaaaaattaaccrggcgtggtggcacgtgcctgtaatcccagctactcaggaggctgaggcaggagaactgcttgaacctgggaggtggaggttgcagtgagctgaaattacaccactgcactcyagcctgggtgatagagcgagactccatctcaaaagaaaaaaaaaaaagagagaacgtggggtttttttggtcaatgggtacaaagtttcatttaggaggaataagttctggtgttctatctcacagaagggtaactgcagctaacaagtgtattgtatatttcaaaattgctagaagagaggattttgaatgttctcaacccaaagaaatggtaaatgtataaggtgatggcgtattagtccttccattgcttataacagaatacccgcaggtgggtcatttatagagaaaagaaatttactttttacagttatagaaatttatttcttgtagctgagaagtccaaggtcaagcggctgcatcaggtaagagctttcttgcaggtggggactctgcagagtcaacctaaggtggtatagggcatcacatggtgaggggctgagcatgctcacatgctagctcatgtctctcttcttcttataaagccaccagttccccgccatgataacccattaatccattaacccattaatctattaatccatgaatagattaatccattcatgagggcagaaccttcaggatccaatgatctcttaaagatcccatctcttgggctgggygcaatggttttcacctgtaatcccaccactttgggaggctaaggcaggcagatcrcaaggtcaggagttcgagaccagcctggccaacatggtgaaaacccaactctactaaaaatgcaaaaattttctgggygcgatggcacttgcctataatcccagctattcaggaagctgaggcaggagaattgcatgaaccctgacgcggaggttgcagtaagccgagatcacgacactgcactcyaggctgggcaacagagcaagactccatyttgaaaaaaaaaaagatcccatctctcaacactgccacattggggattaagtttcaacatgagttttggaggaaacaaatattcaaactatagcagatggatatgctaaacaccctgatttaactattacagaatgtatacaagcatcawaacatcacactgtaccccataaatatgtacaattattatgtgtcartgaagacaacaaattttttttttaaaagagcgttaatcttttaaaaaatgagaactggtagtgtctttacagactaagaaaaacaaaatcaatatctaaatcagctaaaggaaaccttatagtctacagagaagggccctaaagcagggagggaggagggttgctctaggtccttgaacaggcagtaagttagagaaacaagatcttggcttttattttttttctttctttaagcaggcggttaaacattatttttctggttactgcacatctgcccaatgactcaataatccaagttccttcctgagtctgtgaaatcccttctccaggactcaagaaaggcggggacattgggcatccagggctggatcctggcacatgctcccagggctgtgccagacttctaacagcttcatgttaaatgctgttttcaatcatagtttatattttacatcacataagcgagtttttttttttttttcctgtgtttaaatctcccaagatcaagtaagtggaagcaagagacccaaattgcaggaaartgggagtgggtagggataagggaattaggaggttaggcttgtttctctcacgtcttgcccaccatcccttgtccatgtactggtgaccggtgtggaaactggcccagtggattttcctcattaccttttatctttattatcttcctacatttatgattaatcacctgctcatactcatgcatcttttcaaccttactctctgatatggtttggctctgtgtcccacccaaatctcaccttgggttgtaatagtccttacgtgttgtgggagggacccagtgggaggtaattgaatcatggacgcgggtttttcccatgccgttcttgtgatagtgaataagtctcatgagatctggtggtttgataaagagtagttctcctgcacatgccctcttgcctgctgccacgtaaggcgcgcctttgcttctcctttgccttccaccgtgattgtgatgcctccccagccatgtgcagctgtgagtccattaaacctctttccttaataaattacccagtcttgggtatgtctttattagyagcatgggaatagaataatacaccctctttcctctttgttaattctattcccagatctttagaaaagctttccacctttctgcttgcccctctccccacatccacagcctcaccaccatcttctctctccatcttttcattctgcttctttgtttgaaatggccttagtcatgccaggaaaacattagagcagggctagggatacatcagtactgaggaaagacggaagccaaacattttgaaatgaggatgttaggataaagagccagggtcaagaaacyacaagcatcttgaaattgtgaagtcatcttctctagaatctccagtatttcartcccattacattcccctaattgaatctgcctttgccagcctttctgctaaaatacaatttcttattaaacttgatttggtttggtttagcttagctcctagcattgaatcagtgttgttttctgatttactgcaaccctactctgttgttttrcaactctacagcccttaggtacattataaaacttccatggggttgacctagaaacccaacaatatgacattgttctgtggggaaacacatcctaatctcaattcactgactgataaatgttctagcaggaatacttggctccctaggtgtctgcaccatgctgggcacatagaggtgctccaccccaggacaaagttatttcattgagttggcaaattgaggagaaacaggaattctataagtcattgaagaaatccatcatcgaatgatgcttttttgacaagaagtaatatcactgctgttaataactgtgactccccagaaaaaaaaaaaaaagtctgcatttccttttctatcttttaaattttgtcraatcctattttcccagcctttgtgtctctccctagccacaatccacttgtccttcaaagtcttccctggtggttccaagtcaaacagcagtagctgtacaagwgttaatggtagtagctactattttcttttctttcttttttttttttttcttgagacagagtctcactctattgcccaggctggagtgcagtggcatgatcctggctcactgcaacctccacctcccgggttcatgtgattctcctgcctcagcatcccgagtacctgggattacaggcacctgccaccacgcccggctaattctgtatttttagtagagatrgggtttcaccatcttacccaggctggtctcgaactccagacctccggtgatccgcctgccttgtcctcccaaagtgctgggattacaggcatgagtcaccatgcccggccaccattttcttgactattacatgtacctgaactaagtgataagaaggcatcatctcattgaattctcatgactctcctatgagatgcaaaccatcattacccccactttgttagagaggaaagtgaggctaacagaagtaaagtaccacatctagaaagtggcagagaagccaagcccgggacctgagctacctggttctcgagcccctaatcatgctgcctgctcctatcgccaccatctggtttcctcccacgcactcctgataatgcacaatacaacattcaattacattgttcgttcttttccagcaatagtgtgtttagcttttatgctgtgttagattatacgttgctactaaccatgaggaacatatgattcaagagaacaaagaaacgaccttgctctggtggttcagagcgagggtcttgggctagattctgcagcttgccatctgtgcccgtccctgagcccactcctcatctgtaaagtggtgcccatatcatcaaactgtgatgaggattaaaagaaataatacataggaagggctcagatgtggtaatagagcaaaaaaagttagttattggtgtttcgacagcaaatacagtcctaaaatcatgatgtggctaagtagttttctgaaaactaatttggcaaggtcaccagtctgctgtgccatccatgttttgtctgggtggacttaactaacattccctgtctctccccaatgcatcagcaatatttcacattttttgtcttctgtctgccttccaaaattatgaaaacgttcgccctgagcagacccaggcagcagtctaatctttctgccccttcccgctgtaagagaaatatggagtgggtttggggttacccaaatgaccccaaatgttcattctggtctgaactctcccactgacctcctcctatctctcctcctacccctgccctgtaggcaaatcctgctcctgtcatcagtttcctcctctgccacaggagagtatgggccagctgatctgaaggtggcttccagactccttcagacttttttttgaaagaagtaaatcccaagctgttgtcaccatcactgttttctgctcttcataatatcgatgtgttatgtgggtgcgtttgtgtgtgtgtgtgtgtgtgtgtatagccatactgtgttcccatgtatgtatgtatatgtgtcagtgtgtttggctgcatctgtgcgtgactgtatatgggtgtgtttgtgtgcacctgcgtgtgactgtatttgagtgtgtgtgcacttgtctgtgactgtgtgtgcacctgtgtgtcctgtatatgtgtttgtgtgcgcctgtttcctgtgagtgtgtttgtgtgcatctgtgtgtgggtgtatatgagtgtgtttgcatacatctttgtgtgtttgtgtgatatgaatatgtttgctttctgtgtatctgtgagagtgtgtgtgtctttggacatttccacagggttgacgtggcccaaacccaagtgacaagaaaagagggaatggtggtcagctcacttgtgccttctgcgcgacccacgcaggcggaccccaaaagcctaggaagctcgtggcctggataccgccctcagcgcagaggaggcagccccgggcggtgggcggggcgggcccgggcggtgggcggggcggacggcggttctccgggcatgctcggcctcggcggctgcaggcggggcgggtcgcgctggtccccggccggccggagcggcggcggtggcggcgcgaggcggcatgagggagccgctcggtaagtcccggcgtctaaccctcctggctcccaccgtccattagggccgctcccacggcgcttcgcgggcctcacccgcagcctcccgcactccccccaacttctccagctgggacgtcgctccggttccagccaccctggcggtgggggatgtctgcacccccagtcgcagccccgcctgggccccccgcgcggtgcctagcccggcagcctcggggtggagggcgcctgccagcccgggaggggcgtcccctcccctcaggtgccccgctcggagcgcgggggtcccggggcgggcaccgcgggccgcggctggcgttagcgctcgcgtcgcccctcggcgcgcggagggcctggggggccggggtcactcactcccctctcgaagtcgccctccccagcctgtgtccaccaacccctcccgcgccctcgcgcccagatctcgcggacctcaccccagagctgacagccgccgcgctgggtccccgaggtcccagttcccacgctgccccggccgtctggactgcccgggacggtggggggctcccgccgcggccccgctcccgctccggtctctgcgcggtctgcgctggggattagggcgctaatcgcagctgcctcccagcgagtgcccggggccgcccggctcctggctgcgcgtgggatgggagaagggcaggagccccgcctaggagtgctgtaaatcccgttaattatctcatttatgggatctggaacccgccctcctagggtctctgcgctcagatctccgcgggcaccctctacttcccccgtctccagtcggggtccgttcacccccaaaatgccagggtttgcctcgatgccctggccacagtggggcccagcactagctgctaaaaagcgcccctctcgcttccgtcaagaagcagagcgcctgggattcttctgggcatttgtaaagaagctgtgatttcactactgaagaagaaaataaaaacgagaactttaggccagcgctacctgggcatgccctggtgtttggtcatccacgcgcttaaggagtagagaggccttgggggaattagcttgggcacatcacctccccacacctacacccactctcccacccccgcacgcactccacccgcctcccgtgtcctcattccctccccaaatctagtagcttggtcttagtcttggggagaggggtggggcggtgcagaccacacaactcccagggtttcctgtcctgacagtttaatgtgatgtttctcccacaacttgttttccttctccggtcttttgtcttttcagatttacaaggaatagataacccagagattgagggctagggttgcaaaatacagggatttgggggaaggggcctgatgggtaggattcgggcagccagaaatgctctggcaaaaaaaggcagtctgcatggtgtgaactgagggtcatgggctgtacaggtaaaactttgggaatgtcagttcattttagaattttaagaccacccggcaaagcaagaatgcatacaggcttttttggaaatcatatgcagattctatttcattggacttgtgttggttttcrtgtgacattgggagtttgttaaagtggtttggttttccataacgtctgtggattgggacttaattatttaccttgacattaggtgtctaattcttagtcaccagcttaacaagcttcctgaagtctctaagtgtcactgtgggcatgcagcatgtaagaaactgttactccgcctggagkgggcgagcaaatatttgttgaacagaggcctttaatctgctgggccttcctcctgtaaaacttcaccctttgctgcagagactggaaggtcaggcccttggcaggcccaggagaattaggggatttgggtgggtggagaaagcctgtttcggggaaaaaagaagtttggcctgagtgtccacatgctctggatgacttgacaaagtcatcagggttatcaaatagctcatcgagtggtcacagattccagaagcctgtggtctattgttcggcagctataaaatgtagcagggttggaggtacacaaggaaaataaataaggaccaattttttcacttaaaaaaagtaaatatgaaaagattcttgtagtctaatttttaacatgcaatttaaaaataaatcctagaaatgttatcagtacagaaagcccagaagtctgtggctcccccaagttctcactggccagtttgggaggacagtaaacaccagtcatccttaggagtccttagtttttcttttaatgagcttggcgaaactccatgctaattaatctggagagcgtttagaacacagagcgttggagtgaaacaattgttctattgtgttttttattttgataagcaaagactatctctctgaagtcctctgggcctattgctgaacccattactgcagtttacttgggtttttaacagatgttgtttttcctcctttggatgagaagggttatctctctcattaaaaccttgctcttgtgctttgtttcaagggcctgctgatggaaggaatgttgaggtccactgacttgcaaacgccagcagcccagggaggggaggtgttgggctttgatatatgctttaaacactaaatggtgtttagaaaaatacaggaacccctcccccagatactaaaacctcaattatcttgatttgaattgaagatgtcttgttaaaaatttggattatctataaccaaatatctttcccaacaactttctatagatatgcttgggaatagcctggttaaatcaataggctggcagatttgttatcagatcgtgaagtatccttatagttttgggcttattggttgtctttatagtttacctgtaaagattgttttttctgtatgtaaatgaaagaatttagatactattaggaagaagcaccaagatacattccaaagaaggaaagaaaaaaaaaaaagcaagcaacttgtctgtgtaggaagaatarttagagaaacagaaaccagattgttgctactggttatctcttggcacagtggggttactaggaacttttcytttttacttaagcactgagttttgcagtgtttacttttgaaatcactttacatgacttttgtacttaggaaataaatagaaatgtaaagatcatatgaaataatttaagtcaaacactttgataaagacttggcttttttttattctgaagatatttaaaaacaaaaccaaaagaagggtaagtttaatggaatatttaaggtatctttacatgtggagcttgacatacatgatgataagggaataaaactctaacctatgatgatgttttacagctatttttgcaaatagccaaaaattccaaaagatttaaaaatcttatccagtttgagtcctttcttaatgacttctaatctttcagaaatgttaatkaggtacttaaggtctcataaaaatattgctagccaaagcaataattgtgtgacacagaatttagaggtgaaagagaagacaggagaaagagtgtgtgtaagtgcatgtgtgtgtgttcacattagttgtggaaagaaaaaaaagaggagtcagaagggataatacttaggaaaaaaattcagtgcataatgttggggacttttttctttttctttctctttttttgaacaaatgccttaataccaatccaccccagcaagattaatgttccaaggtccttttgatcttagacacaagttttccaactcatttgttttttgtcaccttaaagaaacctaaggatgtcctcctaaaatgattacttcacagattaagtatgattttttacatcttgtgagattttaacaacttgactgccttggcagagttggtcatcacacgtgtggtatggtaacagcagtctgtgagaacttggtgtcccaggacttcaactgggactgttgcgttatttaataattaagactggaaagggaaatagcaattctattgttcatagtaaaatacacaattctacccttaggaaaaaatctgtggaaagcattaaaaacctacgtgtcagttagcaacatactccattctggtttgttttatgtcttggtgatttacctcttgtttaaagaaagtactttgttatatattaatcatagcattagacctaaatgttgtcagttgaagagatatttacactgaactgccaacaatttgagggaccaattacatcttaagcatggaatgtcagtgaatacaactgaaaagttttaggtcttttagaggagtaacaatgtctaattaagacctttttagaatgctggttgtaaccttgtattagatttcttcagcagcacatgtgattttggcttcctgaaaacaggttaagagtctctctggcagataaggcacatgtaccatatactagagccttatgtgatttactactcatttattcttttcttcaatgtttcttttattgtcattgaggcttccaaatacctaacctatttttaaagatgcattttcggccgggcgcggtggctcacgcctgtaatcccagcactttgggaggccgaggcgggcggatcacgaggtcaggagatcgagaccatcctggctaacacggtgaaaccctgtctstactaaaaatacaaaaaattagccrggcgaggtggcgggcgcctgtagtcccagctactccggaggctgaggcaggagaatggcgtgaaccccagggggcggagcctgcagtgagccgagattgcgccactgcactccagcctgggcgacagcgagactccgtctcaaaaaaaaaaaaaagatgcattttcctcatctaacctaagcagcatttcatttatgaaagtttttttctgatgatgaaatagttatatataacttaattaagttatgtaatatgttaatatattaagttatgaataatgatgattggtgatgaaacaatattgttatattaaattatataataagaatgtggatattatatatgttgttatatatacttaagttaatattaagtatataaagttaygtatagtaagtatatgaaattgccaatatttgactatttttgacctgcaaaaygacaatttcatatgattggacstaatacatttcatgacagaatatcataagattcagtaaagtataaataaggaaatttttcaaaaactcagagtccatcacctctgctgacattttggtatgtttcctttcagtgttttttcccctttcaagtacatatgtatataaacaaatttggtatgacattgaatctagggttctgtatcctgtctttattatttagcgtggtatcacgagcatttccctgtgctgttgtrtacctgaaaacataattttatgtatgtgtatacatattatagtccactatatggatgcaccagaatttttttttgagatggagcctcattgtcgctcagggtgaggtgcaatggcacgatctcggctcactgcaacctttgcctcccaagttcaagccattctcccacctcagcctcctgagtagctgggactacaggcgcatgccactacacctaatttttcttggatttttagtagaaacggggtttaactgcgttggtcagactggtcttgaactcctgacctcgggtggtctgcccacctcagcctcgcaaagtgctgggattacaagtgtgagccactgcacctggcccagaattttttttttttttactaaattagacatttagtctaattttgttattatcataattaaaactgggataactatccttatacaaaacagtgtgtatctctgattatttcattaggacagatcctaagaagtgagattattccatagggtttcagatgtttaaagattttgttacatattaataattcttttcttttcttttctttttyttttttttttgagacagagtatccgctctgtcacccaggctggagtgtagtggcacaatctccgctcactgcagtttccacctcargttcaaaggatcctcccacctcagcctactaggtagctaggactacaggtgagcgccaccacgcctggctaatttttgtatttttagtaaaggtggggtttmaccatattggccaggctggtctctaactcctgacctcaagtgatatgcctgcctcagcctcccaaaatgctgggatcaaaggtgtgagccagtgaacctggctaatcacttttaagaagggaaatactcattttcatttacatatagcctgcaccccccaccccccaccatttatacacacacaaacaggagaacccttatagctcctcatgcccttaccaacaacaagcattgctttttaaaagctttaatcatctcataagtgaataatggcattttggtttaatttgcatttctttgattacaggtgagggtgaccatgcttttcatctttttwatagtatatttgtctctctttttaaagttaatttttagtttgtgttctaggccaattttaaaaaggaaaaaagttctggttgatttaatgagttccttaatgttttgtttcctttcactgtcttgagcattataactgtaaatatgagaattaaaatgcttatttttataaatggaaaggaaggagaagatggtacctgttaaatggcattcatttgccagtcctaacctttagtgatgagaagatccgtaattgaaataataccacctagaccatagcatcgcaagggagggtgctgacggggtcttatttgtctttatattcttcagcccagtgcctggcacttccaatgtaaaacaartgccctgatgaatttacgttggcgtaagcgtgcagcacccgcactctgggatggagaattgctggatgtttcgctcctggcctgccttccctagcccactcctttcctcagtgggtggccatttatccctactctcttgggtggcctctgcatgggtgctaataaggccaaggtcagaggttctgtcttcagatgacctatttagccctgttctgtgtcgtggccacaagctgtactctttttcctggggcagctgacttcgatgcctgctgctcatcacaggcragaataggctagagaaaggggcctgcttcctagagctagaaggactctaaagaacctctagttcagccttctcattttactccttcaggagaagactgagacccaaagggttctctcctttcctcctgtgcagtgactcaggcttgattcacctcacagataaataccgtgcaccatggagaaacagacactcatcccaacagcgaagcgggaggtaacccagccccatgcccaatgtcagtggatcgttaacagcaacttcctaattctataatcccttccatttgaatagacaccatagagctaatatttaaagaactttgaaaaggtgccatgcaataagatcactgcaagtggtcttattcaggttctttggaaggacaaatcattaatctttgatgagaatccatttgatgatttggggaaaagagaattttgtgagactaggttggttaaatcaaaataaaatgagctgtcatcttctcaaaccaacaattattttcagtttctatatttctattaatggaatgatcattatcctcgtcactgaggctaaaatccattgtacttcttctcctgaaaattactcttattattccttttttttcttatcccctctgccagccccctgtgcatgttacaatagaaaggacttgtaactacaggtcccccatctgttctcgctctatccactttagtcccctgcttttctgccagatttcccttgcccaaacccatttgtagtttgctgttgtctattcaaattaagtccaaattctattaatgttgcagataagaatggctatttctatataggactttttttttctttaagaatttatttttttaaagttactcatctcccacttattatagatgtcgtttgtatacatttcagtttcatacagcaggctttatgatagccccatgttatttatgaaaagctcaaaactccaaatgatgaaagaggtctgttaaggtcacaaggcaattgcatggtgtattcaagaacgaatcatattactgagcatttaaacattaacaccagcgttgccatcaagacattatagccaagtgaggcatcaactcttgtgtgtgtgtgtgtgtgtgtgtgtgtgygygtgcgtgtgtgcgtgcgtgtgtgcgtgtggtgtgtgagaagagtcatctagaagagccattctgctcctagagaataaaggagaatttttttccttttaaatatatggtttttaattttaatgccaccatgccttctctcttagcttatttatgtgtatggattatttggtaaagtaggaaacttttttgatgtkaaggaagaaaatatagatgagtgaacctaaattagtagcctgaactttgaagctagacagacccagttcaaaccatggatctaacacaagctgtgtaaccttggactgtcagcctcagttttcttgtgaaaatggaaacattcctgtctacgtcgagaagtttgctggaagcatagaatgaatgaaagtgtgccagtacagaatctagcacattacagatggtcatgaatagttgatgttattagatttcatgtgtgctgcaatcctgggtttatagttcaggtttttccttggagttggtagaggaagagtttattgggctggtggggagggaagaatcagttaactacgattgaaagatattcttgctaaatataattaccatgcaaacacataaccatattggaccaacctatccagccccaggaagaaaatggcccacatctgtgttttgtgagggttatgtcttctctgccattctgacaaatggactgtagcacaaccagctgtgtgctgcacatgcctgttccttagtgtattcggtggccatttggagtacagtgcaatttgcttttattttaaagagcccggcatagtaagagagagaaactgagtgttgtgagacctaatgctaactttaactgtgatgctgaccctgtgtgtgatgttgaaccagtgagcctggggactttgttctagtctgccaggattctgttactaagccattaatttcttttctttctttcttttttytttttttttttttttttttttgagacagggtcttgctgtgtcactcaggctggagtgcagtggcatgatttyggctcatggccacctccgcctccagggttcaagcgattgtcctccttcaggctcttgagtaactgggattacyggtgtttgccatcatgcctggctaatttttgtatttttagtagagacaggctctcaccatgttggccaagcttgtctcaaactcctggccccaagtgattcacccacctagcctcctaaagtgctgggattataggtgcgagccactgtgcctggccccatttctttacccttgggataattctactcataatctattttaaatgccagttccccttctcatacacaaacacatgctctttgcctaatgaactcctaaccattcttcaaaacctagctcaaacacttctgtctctcatttgtgcattttctcaacaagtatttattgagttcatactgtgtgcaagttgctggggataaagcatcaaacaaaccaaagaccctgccctaaagcctgactctgtgttcctaaagccctttgcttgtgatgggatctcattcctctgtaatccctcccatggtggaacttactctgttgaattaaagaacaaacccttgcttctctggtccttctttgtctgttgaagcaaatgacccaagttgtacaactccttgaaagacatgcagtaggagtgtcaggagtggcagagttgctatggagatttttctattagtacagtagctgccagagcttgtcagcttccataaaatgtagggacataatggaaaattatcaacttccaaagtttgatactctccatgctgacaggcgagactttccctactgtaatctagcaggtgatgaagagtgaggacaggcaagcagaattgtgcgacagacccgagtaagagctcccagtgacaggaagcacatgccgcaggcatcttcctttcacctgcacacgggccagcaggcgtttcctggccattgttcgccatggctgcagcggctctatttccgtccaccagtkaagtggggttggagctggctgagctttttgatggggctggcttttgtggcttttgtgtgtctctcacccaggccagcattaccatcagcccccgtagaagcagtggtgggtgtatccgtctgaccaatccgtcttacgccttatcatcaaagggaagacttaggaagaaagatgttctcatgtaggaataaacagggcggctctccctcttttgctcgtaggtaggtttctgcccattttcattcttctttgtgggtactcttgttttgtgcagtttacactggaggaagttgctgctgttgattcaggtactatagcaggatttgggtgtggacatccttggctgagagatgcaaaaacttttccccaagatctactgggaagaaatttgattcataraagtttcataaggaggccgggtgtggtggctcatggctgtaatcccagcactttggaaggcagaggcgggtggattacctgagtttaggagttcgagaccagcctggccaacatggtgaaaccctgtctctgcaaaaaaatacaaaaaattagccaggcgtggtggcatatgcctgtattcccagcaactcgagaggctgaggcaggagaatcgcttgaacccaggaggtggaggttgcaggcagtcgagatcatgccactgcactccagcctgggcaacaagagtgaaactctatctcaaaaaaaaaaagactttcataaggaaaagagaactctgggcttgtgtagtgarttgggtgtgtatgattgatcagtgtgttgttttctcgtcatgaacccaaagagttaaaatctatttttggttgctagttaactgccccggggtggctgccctggcagttgctgtttcgatggcttccgctgaattgtatcatgactgtgttgattaaagatctcactctctcctagagcagaaggtatgtctacaagatgaaagcaggggcgtgtcctaagattaagctggatattggtggtttctctttttagaaacatgaagcagtcattgcagctcccaggtctgtattttttttgtccgcactccttccgcctgctgtttgtaggtgagtgggacaaggggaaggtggacagtgttaatcatgtcactgcttaagcaccgtgccacatgctcttctaccagaggcagccatcgaagggtgaggtcctcagggttccaccacatcatttagagtcagagccacacccactttctaggtgaatagaatggagagtaatttcaggcagagccatccctgtgtcccctctttctgtgcaggttctgtgctgtgtccatcgccatggtctggtttggtggggggaccacgggaggaggaggtgtcagactgacctctagggagacctagtcacaaatagagctctctgttgtcctgcagtgctgggtcctgccaccaccatggttccagtggttgagctttgctgaagcccaggcatcatgtacagtgtagaagacctcctgatctctcatggatacaagctgtcaagagaccccccagcatcacgcgaggataaccccaaggggcgccaggcagcgaggactgggacacgagcaggccagggcctgcagaacgggcatgaggatggccctgcggccctcgcacatcgtaagacgtccgcggggaaaggacatgtgagtgactccgaaagccgccgcagcacaccgagaggccacggggagccccagagcacttctgcttccagaacctcggaggcggggtaagtttcactgtgaacccaccgttttcttttgactcaggagtttggcggtgggtgatgtgtaggtaaactctttcaaatctatatttggccagggccaaggagggagaaatggtattagacacaagaacactttttttgctttttgttttgttttgtttttgagacggagtcttgctctgtcgtccaggctggagtacaattgtgcaatctcggctcactgcaaccgtctccagggttcaagcaattctcctgcctcagccttctgagtagctgggattacaggcatgtgccaccacacctggctaatttttgtatttttagtagagacggggtttcaccatgttagtcaggctggtctcgaactcctgacctcgtgatctgcccgcctaggcctcccaaagtgctgggattagtgagccactgcacccggccaccttttttagagacaaggtctcactctgttgcccaggctggagtgcagtggtgcagtcataactcactgcagccttgacctcctgggctcaagtgattctcccacctcagcctctcgaatagctgggccaggtgcacacaaccacacctggctaatttttattttttgtaaagacagagtctcactgtgttgcccaggctgatctctaactcctggcctcatgcagtcctcccacctcagcctcccagagcactgggattagagtcatgagccaccacacccagcccaagatcacttgtttccactgtgatattcagggtgttccagcagcacttagcacagggcttggccataatgggccttcaataaatagcagtgagtaaacacattctgtcatgctaaatgccatgtgttaggactctgcttcttggttcccttgtaatctcttcatcttgcctcagataggagtcattttagaactttgtaaaagctatttcacaaccaygcacccattcacagtatatttggctttcttattaacacaattcaatattttgcagsttacagagagtgaaaagggctctgtattcccctccgtttgtwaaacaaaacgtttcttctggtatattcatatcattccattggcttctgacctatcttttcyttgcacrcacactggccctaatgtgggcatcccatctgaatacagctgcatctgtgggtgtttccttacaacaaaaagagagggcggtttagctaggggaacaggatggtaaaaaaggagagaatttcggcagcttgccacagagccaggctgggagaggagccctgaaaccctctcccaggcggtttccacctggaggaaacctttgtcatcccttcctaacactgtgtttgcctttrgtgctgcactgggaccaggcacagattggggaggaagagctctgagtctacagagcgtgttatgtaactgcatgtcagcagttagatatggacaaaggacacagacggaatcagggacctttctttaagaaaaacaaacaaacacacaaaacaggcaagtctgatgggaatgaactcgccttccatggttcgaggtcacccttgcagacaaaggaccttccttgttggttgacagttttcaggcaaaaatgggaaggattttgtttttagtcagagcacttaacacattattggagaaaagcaaaggtgagagccctcgtttctgcccagcgtagtaaaagcaggtttaagttgccaagtcagatgcttctccagcgaggagcaagaggagttagcactgatggagccaggctcaggggggaaaatcacaatgaagaaggggctggaagctrtttctctttcaccttgtgcttcagaactcacacttctgtcgactactgtcaaggccttcactttcttggctgccattttccagcatggagctggaaaaggggtcttatgggtgagttgtctgagggttcagataaccttagtgactaccacacaaacgggtgcttgtttttgttttgttttttcatttagttttctgctgagtatatttgtaccttccaacttggatatcaaggtactgagattgtaccttgtctcctatttcttttgtttcttgtacagagtcttacagtacagggcatatatggttatttaatacatgctcatgtgctcaatttattctttccccaattgtagcaactgttgaaaagcagaacggtcagtttctaatgaagtaaagacagggctatggaatccctgcagatggaccatgtaggttacgtggggtctccctcaaatttgaggggctggatcagagttgagtctcacggtgggaggcaggagaatcccctttagaattctgtgtgggcagtgtggccgccaacctcatccacaactcgctcaggactttctagccccttgtgtggtaacaggttcctgaggactacggcataatcagatctgcaagctgcctttgtttccatcctgagtgaagggctcagataagtggctttgtgtagccctgggatgttttcatacagatgacagagttctcgacagatctggcctcttgtccatgttgttgagattggccgattcacttagatggtgtagagtggcttttggattgaaggttggctcctagggtagaaatagcaaatgcatacatgtttgcagacatccctgccagtgccccaagcttcagagactggctgcaaggttccctgggttgaaatgaaagacttttttttttttttaggtgcccaatagagaactgaaaattggagggaaacagaaaggtaggcatgaaggagaattgtttttccccatcagaaacaaagtgctttgggaaaaagtaaataggtgtcaatagttaacagcttawattwwaaaaaaaaaaaaaaaaagccaatactgctatggcttatgtgaattctgaatctgatgaataaatggtgctgtcagatcccagtctttggttactcaaaagcacagctgtggtcttgctgcctcctccatcccacacagtgacctctgctgggctggcctcccggtctagggggtacctggggcccgggatagccctgtccaacttgaagccatcagcgtgattgggaagggtcacgagagttcctcttctgcagtttcttggttgagggctgccttaaagtgtgtccccacactttgagccagtcctcaacaccccactcatgtcctgggaaagatggagatcaaggtcatttggaaggccacaggggctgaatgaaaatttgttttattctgacagaatagtggagacctaggcatgttggcaatattattatcttagaactgaagaacattgcattcatccaatgtgtgctgctgtaacaggctgggtaatttatgatgaatggaaatttatcagttcacagttctagaggctgggaaatccagggtcaaggtggtggtatctcatgagggccttcttgctgtgtcatctcatggtggaaggtgagagagtgagatcaaacaagagagggctgaactcatccttttataagggcaccaatcccacctaggagggtggaaccctcattacctcatcacctcttaaaggtcccacctcttaatactgttacaatggcaattaaatttcaacaggagttttagacagaataaacatttaaaccatagccaacacaaagcccagaggatgtcactggccatcaatggctgctcagtgcagcaatggagggagcccagcttgagccacaacttccccaccccccgggctgccagatgccttggggctgccaccctgcagcagcactgggcctggmtgagctctccccaggtgaggcctgttttcgtttgaaaggagcacttgattctgtgagctcctggggttaccatsgctggatggtcttttctcagtcccttgtcctccaccctccccctggcatgcatggacgtgtgacagctctcagagcccagctgtgtccctttcctgtctgggagaggcctataaagactgcatcctgacctgtctacacgagataatgcacataacactgctcttctgtggaygttgtaaagggagcatacatggaaggcaggattatccatcatctggggcttagctggaatatcagcattgtctggtgagaatggtcaggactgttccttaccctgtaatgattagtatcagtttagaacagagtttctgatttaaagaccagctctatctagtaaaatttttttacttttttttttctttttccctttcttactcgagggacttctagtaaaactttaaaaaaaacaaaacacaaacatgaagctttgatgagatttttgagcatacaggacacttgtttcctaatgtgctgagggggctgttgctttgagctttcactattagcagatcaagtagtactgagcatytaggacaggagaagaatgacaattctgttggggagaaagacaaaggagcatgtgaacttgctaaaaatctcttaggtgcaagtagtggagaaggaccaagagttggttctccttcatacatagtttatctaaattgatgagtagacagtaattgttttttgaagctacatgttaacgtgttgggccatcattcgtatgactggtaactttaccagcgtttaaagcacagcagatggactgtgaagcctgactgtgggayccctggctcaggggccctccttgcccccaggctgaagacttcctagcagtaaagtttccctccttcatagatcctttgggaggcaggaagtggaacctacctgaaaggaaagggaggggtcgttgtaaggattcatggagagattcacggaccattcataggaaatggagaaaaactggctggcctcattagaaatggaatgagaaggtgtccccctggattgtgggttattcccctggggactcattcatctctgtcccccattgccacccatctctgcctcccattgccacccatctgtgcgtctccgggtacttgttttgctcctcttcccttccctgacagcttctgcttccccgtacctctggctggcagagacttagactccgcccttgctccccttgatggcttagcttcagaacccactgctgtcaactgcccgcatctcttagttgaaacttttgaaaaaattgagtttcagacagccggtggatgcttgagtactgggttagggtgtctccccrctccgatcagaggggaggggctggacaagggagaggkaggttggatggggaggagggaatgaccaggcatgggtgcctgagctttccccactgcaggtgctgcgggtgaggacagtttccaggccacagggactccctgtgtaccccaaaacatgttctcttcacagacaatttgacaaataacactaaagacttggcattttcccctttttaagtcgttgactccatagagagctcatctagatgctagcccgctcctaaatggtctcagttaacagactgtagtgatgaaactggctgtgggctttgcatgaaaggcactgacgtggtccaggaaaagactcacaggccatgtccaaagcttgcctgctgaaacacacacacacacaaacacacacacacagtaagaggaagtaggcaaagaggaaaaactgtgttatctgcacatggaggaaactgcatgcttaaaatacaagtagccaaaactaaataatacttaacgaccattaaaatatgtaaaaggctgttatcaggcactcagggtttccttaatgtgtttcctttgaaatattataatcagaggaagctgtaaaatacacttaacatagcagaggtttgaagctgaaagttataccataattggctcttctctgcatagccccaggaattctggtaagatttttttgttagttacccatgagaataacttgtaattatctcctgtcatcagcggcagttgtaactaatgagagacttagcaacctagggagagtctctgatgtggtggtctggggccctcatcttgggaggtttctatttgatcagtaaacatccattctagatagtgctactggatatggtaaacagttcattttcagggtcttttaaagcttctcttaaatcatatcctgcttataagggttttccaaaaacagagaatgcttcaagtttaacatctgtttctatgttcctctttcttttacaaacttatgaatcctcaaacacgatttgccttttcactgcttgtttccatactaagcattagctgttggtattttgaccttgttacgaggcaaagcctctctttcttgagggctggcatgctcatgaacaccaggaagacacaggccgcctcttccctcactgtcttctgtatgcccttctccttggtctcgttcgtaagtgtggaaacttccagaagcgcctggaagctggtcctgtctcctgcatgtgccccatgtagcttttaccagcaccagtttccccactaaaaagcaggttgtgtcctttgaacatgaggcttctggaggtgcagtggtgtggaggtgcaggcttctggagtgacaaggaagatccagcggcagcactgccgagggcctcatgcatcttgctggttatgccatccccaagaggagagttgttcgtgtggaattctgccttcagctagagaactggatgagtctgagagctaagaaatgccccacagagagacaccaagggtaggaatgtgagacgggggtccaaaagagacccgagtgggtcttcyggtccagccgctttgcctcaaagatggctgtgcctctgcgttctcgacaaaggacasgktgtggactgggggtgtcactggtgggccgctgtgcagctatggggcctggggcctttaggmggcctccctagggtgtcatcaccagagacccagctgcagggtccttcaggctctcagaaacccatgactagtgaccrccttttctgctcctcacagccctcatcttggcttctgaagaaccgtgggtcggaggcaccgcgaatactccataaatattygttgaataaatgaataagtaaatgaaagcaagagtggtgctagaaaaaggcaaatgagaacgaggctggtctttctccatgtctatcatggcactctgtggttcacactggtgaaagcagtttaacatggtaaaaatctgacatgcccttattaaagagaaaatatgaaaatactgaaataatctgccttacctattagatacgcatgagagagaatggattagagcttctcttcctgccttgttttaataaatgaaatactggtttgttctgcatccgtattgtggaaatgggtgtagcttcttcakcagagaccagccatccccaggaggagcagcgtcttgtgatgacagtcagctacgtcactctttcctggcattgtgaaggcctgttgattacagcttagacaaagacaatgccratctgaaataatcatcaccttcagacagacactcggttcttcaccctttcctgtgtgccacccgcacccccttccccaggcgatcaagcaaacagagcttcaagataacctactccattgagaatgtattttaattgagttaataccaaatgaaacaagggcttcttatgtgtcaggcactgtgctaaacactctgaatgtatcatctcatttcattcctcccaggatacaaaaaggaaggcgtagtccgtccctgcagtacagatgaggcatcagaggcaggggcagttaaggacgctgccgacagcgttccactggacagccgtggtgttggcctttaaacccacgccgcccctccagtgcccagggcagctgctcaccactctcctggcaacgttccaacactgctccctgttggtgtgatgagaagccagaaaccacccctctgcacgtgccccgagcctggactgttccgttgaccctgggcagccgtctttgggtgtcaactgcaggttcatccggctccccaaggactggccacagacattgttttctcagcctatttttctccatctataccttttcttcctcaagttagggaatccacaagaaagtgatgaataacactttgaaggtattatctcatttcatccctcccagaaaactcaaaaggaaggattctgtccctgcagtacagatgaggcatcagaagccgaggccggtccagctgcccacccatcaggtgggaagggcctcacgttgtgggagggaacagtgtctgccctgcgtgcagtcaccaggacttctcctagtcactcgggtggggaaccatttctctagtgcttcctgtccctgcctgtgacaacaccctcaggggtggcttcctgtaggacctgggatgctcccaggatgatcattgatgtggagggacagggtcctctatcagtgggatcctagcatgggaggggcgtcagcatctggccctctagggagtctgcctccaagtaagggccacccagtgtggcttcttgcctttacattcattagaaggcatcagtgcgtccttgccatgttaatcagtaaaaggagtgggctcatttaaatagctggcgtgaktcgggggttaggggtttatgacccagctttcttcccttagaagtgcagttgcaggaaggatgttgttcagagataccctgactcccagtgagaggttctagcaccttcatcggggacacattagtacacgcagctggcggctgccccaggagccctcacaagctccacctaccttttctccaggttattgttttccttctccttccacrtggacctatacccttcttccttcatttgtatccctttgctccatcctgcttctctcttctctcttctctctttctctttctcttttcttttctttctttcttttttttttttttttttattttgagacagggtctctctctgtcacccaggcgagtgcagtggcaccatctcagctcactgcagccttgacctcccaggctcaagcaatcctcccgctcatctcgagtagctaggaccacaggcactcaccaccacatctagctaatttttctttttaaattttttgtggagactaggtctccttatgtttcccaggctggtctctaactcctgggctcaagcratcctcctacctcagcgtctcaaagtgctgggattacaggcatgaacctccgtgccggctctctctttgtcttcgytacctgtaggttggtcagtggtccacatcaatgaggcgcccccttgcatgagtagtctcccagcccctgattttgttacgtgcattaaacactactagaattaccatgacagtttccaagctggcgccatccttcacatcagcaccagttgtgaatttactaatttatgaaaaggaagcaacaaccccaaaacccagtcccaggggtggggccggtggaccgtggcctccgacttaacttgtgtgtataaaagttctttactagaccttgcaaaatcaaaagtctactgaagccctaacccaaagatgattcagaaacctgctggcaaccacaaaagagcaatttgtgtccatttctagccgtcagagtttaaaaaatattatggtcttgtggctggccaggttggcactgtagtggcaatggcttccaactttttttttttttttttttttaatttttccattctgagttcatctttgtggaagccagacccaagcgcaggagttcaaagcccatgctgtggaggaactgcgacttcargggcttccatccaggtcgatatcagtgggtgcctttccaacatgcctcctacttaatttcctctgtgcacgttgataactcaagtgcctttgaattgctttcctgtgccccttcttcaaatgtccaaatttagcatcacttctgagtcctcaaatttattatgcttcctcttccagacccattatttgtgtatttttttttaataacaaaactgtaacctccagaaatagtcygccaggtactttatgttttaactgaatctgcactgcctgtcatctagagtcattcattgtgacatcataaaaagcaggcctgwcaatgcattagcagtctgactgggcatttgtggattttctagttaccattctgccagcgcaacctacaattcttgttcaaattgaactttgctgaagagtaatattcatccattatgttttcagagcagttttctcttttctgactgacctttaattttatgctaacctctatacttcagtcttcatcttctccggaccccagatttcccctttccaaaattagcccattcgttaccctgtatcagagggatatttgcacggggtggtatactgaatagaccaaatcatgctgaaaaaagaaattgcaggcttccaggcccagagagctttcagagcaaattctggagcggaacatggctgaggccatcacagaagcatgttaggcacctgacagcggggttggtgaatgtgagtcgctctaaagagatgcccaaagccccttctgccaaccagaggagaacgctgctcctggctctttcagtgagacctacagccttggcggtcagtttctgtatctggataccaatgcctagatacagacgcctccggaaggggaggggcttttgaaggaacaggctaggccagtgtgtcatgaccatccactggtctagaacatgacactagggttggaaagcaatggaaagcagcaggcatctgctagactgcagatctgggaaccaggaagggatcgctggataaaggcatggctttaatggggcctccccagccccaccccaatgaccacagcgaagcatggctgactggactttgagggcccccacgggaggaccaggctcaggattttgttcatggaggagggaagggtaactgtttgtctcacttcccacagaacccccagttcattaggcaggcagcaagcctctggctgatttcttaagttaatccacacatctatcccrtgctcctgggtatcaggcccagtgccaggctgcagctgcctgggtgataacaagtcagtgtggctcatgaggaccttggaggccactgagaagatggggaatgtgagccagtggttacaggcattccaaatgttgcattttttttgttttttttttttgagacggagtcctgctctgtactgcccaggctggagtgcagtggtgcaatctcagctcactgcaacctccacctcctgggttcaagccattctcctgcctcggtttcccaagtagctgggattacaggcacccactaccacgcctggctaattttttgtatttttagtacagacggggtttcattcaccgtgttggtcaggctggtcttgaactactgacttcaggtgatccgtccgcctcagcctcccaaagtgctgggattataggcgtgagccactgtgcccagcccaaatgttgctattctaaggagaatcactttttaaaagaagggtatcattttccattgtggttgagaaggagtcatgtgaatgaacagaactgtctcctaatttttctcataattagctgctgcatatgcagtgaatagacttgctcattttctgttaaacatattgtttttcacatgctcatatttcagatgtttcccaagcagttgctagtagttgtttcgctggcctcatctctcctgagatgagagatggggctgttggcaagtgtaacttctgtttcatctccrtcccgttcacccgggaattctgtgtaaagaccctgcttgtcccattgaactcatggacacaatttgtctgggcratcacattccactttgctttccttatctttttcccaccctgtgttaatgtgttcagcatgttttcctagaagtgccattgttaatgtcttttaaaatgtaagataattagtttcatttttctaaaaagaaaaatttgatctcatttccttaaacatatcagaaaatatatttttggctttgaaaccctatgcagcagtacacattttagctggtaatgggcgtcctatagcgaagctactagaagagccattcttgctaacttgtctgaaggagaaatctaccagagcgacccccatggggagtccgcttgcacctgtcagagcccagcccttgctaggtacaaaatagatgtttattaattaaatggtttatagttttctatgtcatgtggactgcgttgcaaagtagataatttaaaatttcccggatgacctgtatttttattaaattggaattttggcaccttgtgcaaacagaaggaagtttaacccaaaattcttagttattttggtttgttatatatggcagttttgacaaagttaaagtgatagtgtaacatttttgggtggagaagaaaaccaaccacgctccctctgtaggaagtgacaggctgtttgtattcttgtcctatttctgtcattttttatctgtcttctgattatgctcgtggcgtgtacttgcacaagtagcaccttaggattttagccccttctctaagcacactgtgaaacccgaatatcaattgagaaaaacgcgtcaaagccacacggtacggtttcctccctaaagtcatgcaatccaggaaagcgttcacaggactgtcaggaatgagaayggtgcttcataaaagcctactcaccatcagcctaagagcagaggtaagagggtagattgtttctgatgcaaagcaccaaccgcatacttcctaatgatttcttttagcctttcacagtggggtgtaacaattgtaatgccttattacatggtagtttttaagtcttgcccttggattttctatagagtctgggagcctatagacagtaggtgctgaagacttttcagtggttcatgttctacagcatttctcaggctactgatgggcggtcacacaggagtccccaggggaggactctgtggcttctggagctgcaagcctggctcagctaaagtggggagggagggaggaaaggggctatgcagaggggccagtgacgatggctttcaaaatgactaatctgtgtcgaacctgaccaggaagcagtcttctcagcattcaaaacccaaatgctcaaaacataatttcaatgacaacaaaarcaacacagaaattgtgacctyctaccgtgcccggtgttaagacagtacaggtcttataccaygtacaggtcgttaacacagaagcattgaggctgctcagtggcaaatgtcttacctcagattgattttggatattttctggttttccagcccataactaagctttgctgtaaatgactgcctaacaagttaacagggggtagaagtagatacagaattaytgttattatyattattattattattattattattattgagatggagtcttgctctgtcgcccaggctggagtgcagtggcatggtctcagctcactgcaacctcctcctcccgggttcaagcgattctcccacctcagcctcccgggtagctaggattacagatgcccgccaccacacccggccgatttttatatttttagtagagacagggtttcactgtgttggccaggctggtctcatacttctgacctcaggtgatccacccacctcagcctccaaagcgctaggataacaggcatgagccactgcrcccggccttggayacagagtttgaggggctatccttaccttttaaggcaaagaggtaattccaaaataagaatagtagcaayaaaaatagaagtttttaccagggctcctgcccacagccttctgcctctgtgattggaagggctctcctgcagcccaggccccagcagggactcttccaggcttcacgcactgttgctgcatagaactggtggccttgcacctcccagtttcatgttgtgttcactctgstgtgccaccagctgaaaagcagactgtgttgctggaatcattcgaaaccacaaaatgtataataacacctaagcacatggggaaaaagaaatygacctcactagtaatcaaagaaatgcaaattaaagtagtgagaagttatggggaaaaatagttgtaataactagggawgaaaaggttcagcaagaccggctctcctctgcacgacaggagggactataaattggatagtttatctaaggtcagtttgacaacatgcatcacacaacaccccatgatctactcacttcttttctaaggacttactctaaatgatctgagacctacatcacgtgtttgtgaacaatagtgtttttcaaagtgttttagaatagaatccacatcaatgtccaacactggtaaagggttaagtaaatcctgtgtgtgtgagggaatacaattcatccatgaacattaagcacctgagggcgttttcattacactggaagaagtaaaatgcagggttaattgagcgttttaggttcacatttcttggcttagagctctttcacaaatccttgcaggctgtgtaacttggggaaatcatttaacctacctgtgcctcagttttcttatctgtaaaagcgggaagtagtggtaattataacgttgaaatgaaataattcacttggcatgcttagcaccatgcatggtacagcatgggtgcccagtagatgttagtattaagcaagttacttaacacctgtgcctcagtttcctcctctgtagagtggtattgacagtagcttctacctcagaaggatgttggtgaagcttaaatgagttagtttgcagaaagcacatggcttggacctagcacacagcaaccaccgtgtaagcagctgctgctgtttgtgctacaagtgtcaggaaatgttcacataataccagatatctagtagaatacccaggctgttcaaaaattcacatcctcacacacacacacaggtgagaagatatgtatcaaagtaaccatctctgagtagaaaragtataagcaatttttgttttttgtacttttttatattcttccaacattcattttcaacaatgaatccattactgtaataatttaaaaagcaaacagctatcctagacttgaaacatttttcaagtcagcccggcccatggttaatcaaaactgttgagtcccctgaacttccttccagttaatggtttttccctattacatggccctagtctctgatcattcatgggtagtagcttaatatttctgcacattatgttcttcagatactttcctttggttgcattagaactgtgattctgaactctccccgcatgctagagtcatttgggagattttgaaatatactggctcctcattagaccaattaaatccaaatatttggagatgggccctgagctttggtattttttaaaggctcacaaggaaatcctaatgtgtggcccagtagtgaacaacaccctgcatttgatactaccatttcctgccttgcagagagtttcaccccatgaacagggctcccctcttcctctagacaatctcaatgtaagccctagcagtgtttcccaaaattgaggataagaatcctctgaaatgcttgttaaaaatacagatggagccgggcgcggtggctcacgcctgtaatcccagcactttgggaggccgaggcgggyggatcacgaggtcaggagatcgagaccatcccggctaaaacagtgaaaccccgtctctactaaaaatacaaaaaattagccgggcgtagtggcgggcgcctgtagtcccagctacttgggaggctgaggcaggagaatggcgtgaacacgggaggcggagcttgcagtgagccgagatcccaccactgcactccagcctgggcgacagagcaagactccgtctcaaaaaaaaaaaaaaaaaaaaaatacagatggggctgggcgcagtggctcactcctctaatcccagcactttgggaggccgaggtgggcggaagacttgaggtcaggagttggagaccagcctggccagcatagtgaaacctcgtctctactaaaaatacaaaaattagccgggtgtggtggcaggtgcctgtaatcccagctactcgggaggctgaggcacaagaattgcttgcacccaggaggcggaggtggcaatgagccgagattgtgccactgcactccagcctgggcgaaagcgagactcagtctcaaaaaaaaaaaaaaaaaaaaaatacagatgggccaggcatggtgcttcatgtctgtaatcccaacacatgaggaggcggaggtgggaggatttcttgaggccaggagatcaaggccagactggacaacacagcaaaaccccatctctacaaaaacatcttaaaaattagcaagacatgatggagtgcctgtagtcagtcccagctacttgggaggctgaagtggaaggattgcttgagcccaggagtttgaggctgcagtgagccatgattacaccactgcacctarcctgggtgatagagtgagaccctgtctcaaaaataaatatataaataaaaatataaatacaaatgcctgggccctaacccagacctaccaagtctgaactttcagtgggagagacttggtaatgtgtatattttacaagcccactgggtgatgcttaccatcagagagatgaggggactctgctagagacatctttctcaatcttggctgcacactgggaatctccggggacacttggagartctcggatgcctgattgcctcgccctccatttaccacccacacgtcttaagattgtaatgtaatgtgtctaggatactgcctggcatctggatttttgaagtcttcctggattctaatgtgcagtcagggtgaacaaccaccagcaatgatgattctcaaagtaaggccctgggaccagcagcatcagcatcatctgggaacttgcagattatagagcccctctccagacccgccagatgagaagctggggatgggacccagcaatctctctcttagcaattccaggactcagtgattctgattctcactaaagtttcagaacccttgcttaaaaacagtgtttttaaaagcaggttcccagattccctcccagagattgcacaggaggtctggactgagccggcaatatgctgcaagtggtccaagaccacaccttgagaaatactactgaacagttaacccttgttcccttgggcatttttttttccttatgaggcagggtctcaccgctgcccgggccggagtgcagtggcgcaatcacagctcactgcagcctcgaactcctgggctcaagcaattcttctacctcatcctctggagttgctgagacaggtgggcactaccatgcctggctgatttttaaatttygtgtagagacagagtcttactatgttgcacaggctggtctcaaactcctggcctcaagagattctcccagcttggcctcccaacgtgttgggattacaggcatgagccacggtgcccggccttccaccagacattttaatgtttataaggaccttgacatcgctggagtacacccaacatccctgtattcttgtgggctgcccactgctgccccttcttggcccttgatgccaaaacacgtggctgtcttccaaccataattaatgggatatgttttctttcaagctggcaagtactgtggctgggaaccaagttttcaaagttgctgacctgagtttgacttcgaatgccagtcacagaagcagatgaagacatgtttcttctgtgcctaacgtctgtgactctttgttttgtaggttttgtaatcaacccccctcagcatggtcctctcatcccccgactggtaacgaccaagcctaccggagaagaggacggcaagaagccagragccagaagccgagggagcacgaaaacctggaggccagaggaatggcccaagcccacagcctgcctgtccacgtgagggagggtccatgggaagttggaggaaggtcagrgcatgtgatgaakaagccagtttgggaagaagaattgcgaatgtcaggtcctgccaagtggcagaacgtcagcctggaaagctggaaccagccaaggaaattagggaggcagatgtctgatggagatggggagagactgtttcaagacctgtacccattcattcaaggagaacatgtgttgaattctcaaaacaaagggaagtctcgctcactgcctagagttctttcccccgagagcctgagttgcacrgaaattcccattccattaaatgaaagacattcacctaaaatgccaccgtatcctcccacttgcgcaccaaatttggactccacgaggaattctgagaagagtggctgctcagccccatttccccggcctaagtttgggaggcccctcaagcccccatcttacagctcgcaccagcagtctaggggaggagcggacagcagtgactctcaggacagccagcagatggacgcctatgtccccaggcatgagctctgcctgtcagaccctggattggaacctccagtgtacgtgcctccgccctcatacagatcgcccccgcagaacatcccaaacccctacttggaagacacggtgcccataaatgtgtgtggcggtcacagtcaacagcagtctccraccgagaaggctggggccagcggtcagcctccttcaggcccccctggaactgggaatgagtatggtgtgagcccccgcttgcctcagggsctcccyrcacatccccgaccygtcactgcctaygayggcttcgttcagtacattccctttgatgatccacggttacgacattttaaactagctcagccccagggtttctgtgaagacataaagcttgacgataaatcatataactccagtcctgtcactgctcaagagccggctcatggaggaatgcagcctgatggtgccatttggaatccacagagcttaatacccccgtcgggggatgasagaggcctggtcttggccrattccagcccccggtggctgtggggccagccccccggggatggggaaaacagtggcctccccaaccagagagaccgctgtgtggcaaggggacagtggcctgatgtgagaggcagccagcacgggcacactggaagacaagtttcctccccwtactcacagggcgagagcacctgcgaaactcaaaccaagctcaaaaagttccaaactgggactcggaccaagaaaagttcaaagaaaaaaatgaacgaractatattttgcttggtttctatcccagtgaaatcagaatcacatctgccagatagagatatggacaacaatgacttaaagcccagtgctgatcaaaagaatgggtctgataagagcccggctctgcaagaacagagtctgctgagcatgtcttccaccgacctggagctgcaggccctcacaggaagcatgggtgggagaacggagttccaaaaacaagatctaggggaaccagaagaagacagacaaacaaatgacctcagtttcatccaycttacaaagcacagagaactcaagcattctggctcttggccagggcaccggtacagagatcagcaaacacaaaccagtttctccgaggagccccaaagttcgcagctgctccctggtgcaaagctgggagggccgagtcgtgcagcattgagtccaraatgttcagaccctgctgcctccgmagctcagacgcacacagcrttccctaccggtgatcacaaacagaggccaagtgcccgtaacctgaaaggtcacaggtccctcagcccatccagcaacagtgcgttctcaaggacttccttgtccgtggaccaggcaccgacgccaaaagcaggccgaagtcagccctgcgtggatgtccacgggcttggagcccaccctgggcctaagcgggaggtggtgaagggggagcccacgggcccttgcaacagtaaacaactctttgggcagtttctcctgaaaccggtcagccgtcgtccctgggatttgatcagtcagttagaaagttttaacaaggagctccaggaagaggaagaaagcagcagtagcagcagcagcagcagcagcagcagtgaggaragtgaggcggagccgcagcaggagaaccgtgctcactgcagacaggaggatgtgggcttccgcggaaacagcccggaaatgagggttgagccacagccgaggatgtgggtgccggagagccctgtgtgtaggtcgggaagaggtgagagtaagtctgagagctggagtgaggagctgcagcctggccacccacgtgcctggcctccatccccgggccgctttcgcgtggaagaaggtggcggtgcacctttctgctcagcagatggaagcacgagtgcagagaagrgacacctggaggttagcaacggaatggacgagctggcaggtagcccatttcctgtgacgagaatgtcttcaagatcaagtgacgcaaaaccactgcccgcgtcctatccagctgaacctagggagccccaggaaastccgaaaatcaccagtgctttcagctctgtgaaaccaagtgaagcggtccctcggaagtttgacagtggtggagagaggggggcagggctcccactgtccctgtctaacaagaaccgagggctctcagctccagacttacggtctgtggggctcacccctgggcaagaacagggtgccagtgagctagaggggtctttgggtgaagcaagcacaatagaaatccccccaggtgagtccttgcaagccagggctgcaaggatcctgggcattgaggtggsggtggagtccctcctgccgggcatccggagagcgggacagaaccagcctgctgagcccgatgcaagtgcctgcaccccagagtccccccaggaagagttgctatctcgcccagcacyggcagatgtccccagggtgtccactgatgccttttatggcaggaggaagtgcggctggaccaagagccctctctttgtaggggacagggacagtgccaggcgggctcctcaggcttttgagcactcagatgtggacggggttgtcaccagcacagaccctgtccctgagcctgagcccagccccttggagtccaagttcttcgaacaaaaggatgtggaaacaaaaccacccttcaggtccactttattccattttgtagaaagaaccccaagtgtggcaggctctgaaaagagacttagaagcccttccaaagtgattgaaagtttacaagagaaactggcctccccgcctaggagagcagaccctgaccgcctgatgagaatgaaagaggtgagctcagtgtcacggatgagagtcctgagcttcaggaatgccractcccaggaggacgccgaggaattgaaggccaycacaaggggccaggccgggctcccgggaggccttgtgtctcctggcagtggggaccgtgcccagagattgggccactcactctctgtgtccaaggacagcatctccagggaagagaaggagcatccggcagcacaaaaggagaagagcatggatcaagacttctggtgcccaggtgaggaatcaggcagacaggcaggtgctcagtatacatttggagtttttagtcagtacaaaataccaggttggtggataatgtaaatctgcatattcagaaaagatcaagttgaccctgggaattgttttatcaaaagattcctcattttcgaagaattatccagaagccatctttaaaattcaagatcttgcagtatattttatttttttgagatagtatctcactctgtcgcctggctggagtgcagttgtgcaatctctgctcactgcaacctccgctgcttcctgggctcaagtgatcctcccacctcagcctcccgagtagctggggccacaggcatgcaccaccatttccagctaattttttaatttttttatagagacgagatcccactatgttactcaggctggtctcgaactcctgagctcaggtgatcagtagaagagttgagataaatgtcaaaagatccacatcataagccatggactggaagggaccttctgtcatytagtctaagccttttctccctcccctcccctcccctcccctcccctcccctccccttcccatttttttctttttgagacagagtctcactctgttccccaggctggagtacagtggcacgatctcggctcactgcaacctccgcctcctgggtgcaagcgattctcctacctcagactcctgagtagctgggactacaggcgtgtgtcaccaggcccagtttatttttgtatttttagtagagatggggtttcgccatattggccaagctggtcttgaactcctgacctcaggtgatccacccaccttggcctcccaaagtgccaggattacaggcgtgaaccactgagcccrgcccagtccaagccttttacagtaaggggaaaagaaaaacttggtccttacgagttgagttagaggaatgccctctcctgagctgggcccttccctcttcctacccagtctccagcaggtggttctgctcctcccacccctttctattttctgttttgaaacccaagaattttgaagcagatagaaaagagctgttgtttcagttggaagtagtcagagatttctattgaacaaaaaaatgtagggccgggtgctgtggctcaagcctgtaatcccaacactttgggaggccgaggcgggtggatcacgaggtcaggagatcgagaccatcctggctaacccggtgaaactccgtctctactgaaaatacaaaaaattagcygggcgtggcggcgggcgcctgtagtctcagctactcaagaggctgaggcaggagaatggcgtgaacctgggaggcggagcttgtggtgagccgagattgtgcctctgcactccagcctgggcgacagagcaagactccgtctcaaaaaaaaaaaaaaaaaaaaaaaatgtacatgggcactctcaagtttcccccaaatacagtgggattcttaggggtgttagccagtgttgcttctctgctccttatgcaaaacacatgattgaaataatccttcgtcggggccccgttggatcctctagttggacaagctgggcctttgcagtggtagagaatactgagaatgtgaaggctttgccattatggtaggaaaagggttacctgcccattttttgagctttctggatttattgtagccttcagcataattcctctgcagtcccccttcctcctcaaaaaatatgcccactagactttaaggttagttaaaacttgtcatagacttctaaagcaagttttcttcatctataaaatcargatgattttctcagtcctacatcttcctgaaaattgtaaggagtttaaaataagacaaataaatcctgttataatacagtaccagttggtaaatatttctgtgtctcagttcatggaaacctatttcaggraggttttttgttttgttttgtttgagacagagtctcactctgtggcccaggctggagtgcagtggcatgatcatagctccctgtagccttgaactcctaggctcaagcgattgtcctgcctcagcctcccaagtagctgggactacaggcatgcatcatcacactcagctatttttttagttatttgtagagatgaggtcttgcctacactgctcaggttggtcttgaattcttggcctcaagcaatcctcctgcctcaattatggtgcccagtctagggagtatttgataacacaaaatttccagttcagaaaagcactccttcaatttttaacttgactatttagtgtgagaaggtccagtaggtatctaaaaacacccaggtaatgcaaattttaattttagccagttattaacaacacctccctcatgacgtttttgggttttttttttaaccactgctactaacaagcagaaaatttaattatttttttctcctctccatctgatgcatttgctaatatacaataaaatggccaaaaatctgcaggcagagagccactcatgttgacagcttcctcgggcattttcaagtacagtcatgcgtcgcttaatggggctgcactctgagaaatgcatyattagcagttttgtcattgtgtgaacaccatagagagtgcacttctacaaacctagatggtagaatctactacacacctagtcttcatggtagagcctattggtcccaggctgcaaacctgtacagcctgttactgtatggaatactgcaggcaattgtaacgcaatggaaagcatttgtgtatctaaacatatctaaagaaaaggtacaggccgtgcgtggtggctcatgcctgtagtcccagcactttgggaggctgaggtgggtggatcacttgaggtcaggagttcaagactggtgtggccaacgtggtgaaaacctgtctctactaaaaatacaaaaattagctgggtgtaatggcaggcacctgtaatcccaattacttgggaggctgaggcaggagaattgcttaaacccgggagccagaggttacagtgagctgagatcgcgccattgcactccagcctcagcaacaagagtgaaactccatctccaaaaaaacaaaaagaaaaggcacagtaaaaatatggcataaaatattaaaaaaaaagaaaggaccacttttgtagggcacttaccatgaatggagcttgcaggactggaagttgctctgggcaagtcagtgagtgagtggtgaccgaatgtgaaggcctagaaaattcctctacactactgtagactttataaaccctgtacacttaggctacaccacatttgtttaaaaattgattgcactatgacatgacgtcactagatgacagtaatgtttcagcttcattattatcttatgggaccactgtcatctatgtggcccgtcattgaccaagatgttgttctgtggcgcatgaccataatcggaggggagagcaccattagggacgatatcttacatttgttttgctcaggtggccccctgtgggcctttcatgtgatggtcaccaggcctcaatattcaaaaccactcgtcttkagagcaactgaggtcatatgatggaggtagtaatacttttgacgtatgtccacttttccgctcactgttgcttcacaagttagagtaaagccttgttgttaagtcactgagaagcgcttggactttgctttccttttgatrtatttaatcattttaaacataagaatcctcatctcttccccactgcactgctgcccccatgaccccagcatgctaraactgcttcattgctcctaaatttgtagcccatttaaattcaagcatctgttctggcactgtaacacaaggccatgccatgtctatccgcaccaccccaccctacacacacacccttgtgccgtgcctgtcatatcatcaagtgtcttgagattaaagttggtcgtttcagctcacatgtctttagtggtctttcatgcctctggttaaraaatcaacagcccaaaacgagttcgggtcacagactcccatctttgctggatgactgatgctccaattcggaagtgtcatcccaggcattgatcgtacacagaacctcctggttccatcatcctctgttgcaaactctgttaatatgagtccaggggaagaatgagaagagatatytgtgtgaggcccaaaatgagggaaatcggggaaggcttcatgataccagatcatgccatgagaaggctagatgttagcacatctctgagggcgttaatgtgtgaaatacccaccagggcagtcctcagtgagttgtcctcagctgaaatggagcccacaggaaacaggattctaaattctccgggtaaccaccctaccctctrgacctgtgctgtccaatattgtagccgctcatcacatacagctactgggcacttgaaatatggctcatgcaaattgagatgtgctgtaagtgtaagatacacaccagattccaaagacttagtacaaaaaaagaatctaaaatgtctcaataatttttatattggttacatattgaaatgatattttgaatatatttggtgaaatacagtattaaaattaatttcacctgtttatttttatgtgtttcaacatagctactagaacatttaaaataatgatggttgggcatggcggctcatgattgtaatcccagtactttcggaggcagaggtgggaggatcatctgagcccaaaaccagcctgggcaacatagcgagacccccatctctacaaaaactgaaaaacaaaattaggcttggtagtgcatgtctgtagtcccaactacttgggaggctgagggaggaggatcacttcagtccaggagtttgaggctgcagtgagctgtgattgtgccactgcactctagcttgggtgacagagtgagaccctgtctctaaaaaataatgttttgtggcccacrttataattttactggacctggatagtccatgagctgaagaaagagccaggggactgtrggcagcaggtgtgtcctgtggaggtgtctctagtgtgcctggcacaaaagaccactaaaaaggtgtgagctgaaatgaccatctgtaatctaaagacacttgatggtaggtacaacacagcacagatagtaagggtctcgaagggtgtgtgtgttgggtggggtggtacagacagacatggcatggcctgttccatgcctagtgttatgtaatgtgaggcttagcctggaagaaactaagcatcttartaacaggtgctcccactagccgaagtgtgacttccacacgttctcataatttcatgaccgcacaccttattctcaatggagaaaaagacacctttgctcacaggaggaccctctcagaatgtgaacactctgaggctgattgagcacagaaatgaagcacccagctattaatgtcttatattgtttcatggatgttgttaagcatcaacagtcagaaagaatttatgtgaactccccttccttttagccagattattcctgcgtgcagctgatgacgtttgagcaaacttcttttcctaaatgcagagactgtcccatctgggtagtaatgtagggctttaagtactctgaatgctgtctcagtcatcacagtcgtgatacctgttgtatcatacatctgtctcagccaggttgaaaaggagtgaggaggatgtgtaagacattttgctgctggaaaaattggaatgtctatggcctttttaatgcacagttgtccagatggatttcagaaaagattgtttttcacttttctttttctttttttttttttttttttttgagaccgagtctcactctgttgcccaagctggagtgcagtggtgcgatctcagctcactgccacctccaccttccaggttcaaatgattctmgtgcctcagcctcccgagtagctagaactacaggcatgtaccaccacacctggctaatttttgtatttttagtagagatggggtttcgccatgtcggccaggctggtctccaactcgacctcaggttattcacctgtctcggcctcctaaagtgttgggatgacaggcatgagccacctcgcccggccaaaagattgtttttctaacttttcagatacttccagatttcctttttttttttttttaagtgaatcaccttttttgaccatgccgagacttgctgttttttttcctttttctttttttcccagctttattgaagcatgattgacaaaaattgcatatatttaaggtatagaacatggtgttttgattcatctatagattgtgaaatgagtaccccagtcaaggcagttaacatagtcatcttctctcatagttaccagtttttttgagtgtgtgctgagaacatttgagatgtactctatyagcaaattccaagtgtacatgatggcattagtaactaaagtcaccatcctatgcactcagtctccagtacttactcatcttatagcttagggtttgtaccctttggccagtatttccccttttccttcaccccagcccctggcaaccacccttctactctctgttactgtgatttcaacttttttttttttttttaaatgattccacatataggtgagatcatgcagtatttgtgtttctgtgtctggcttttttgactaccataatgtcctgaagtttmatccatgttgttgtaaaatggcaggatttgcttatcttttagggccgaataatatcccattgtgtgtgtatatacaatttctttttttcttyytttttttttttttttgagacagagtttcgctcttgttgcccaggctggagtgcaatggcgccatctcggctcacagcaacctccgcctcctggattcaagcgattctcttgcctcagcctcccgagtagctgggattacaggcacgtaccaccatgcctggttaattttttgtgtttttagtataratggggtttttgcatgttggtcaggctgrtcttgaactcccaacctcaggtgatccacctgcctcggcctcccaaagtgctgggattacagccgtgagccactgtgcccggctatataatttctttatccatacatccagtcatgaaaaccttgatgattaggtagtttcctatcttggccattgtaaataatgctgcagtgaacttggctattgtaaataatgctgcagtgcagatatctcttccatactgatgtcctttcctttggatacatacccagtcatgggattgctggatcatatggtagttctatttttaatttttttgaggaacttccataatgtttccataatggctgtactccttccagattgcttagacattttctctttaaaaaataagaagcctttgagctgctatggcaggaaaatcttaccacaggaggcgcacgtgtragccttaggtttgtctggattccagacagacatctgtgaattggaggttgtgggacttggcagcacccagcagcagcagtagtggcagtttaggatgattgctcttttgtatggtgtcccgttttagaaatccaggtcatctgggcacagattgggatttttccattgacggcagtagaatggatcagtgcgtgaggggccagactcgtacatacctgtgttagaaggctctagaagccttgcgctgacaggtgagcatccagccctggggctgcctaktggtcagtggtgatgagagacagaaagcctctctctgccagccaagcagtcaggatttgaggatcctcacgccttcaagggacagcgtttgatcacaaagatgcgtattctaaagcaagctttcttttgagctgtaatttaccaaaaaaaaaaaaagaagaagaagaagaagaagaagaaagaaagataagacatctaccttaatatcagccaaacacatcactgccagtttggaaacattgcgtttaaagtgaagtatattccacggtgaacaggaaggagccgccgaagtattcagcagttcatattttcccatctgtgtttgggtaatgactatgcacaattctttgaaaacagcctttttgacaaatagttttttactccttagtgaaaacatgattgttaaaatgtctaaaaattaacctttatacacttgtagattttgttccctagacaaattcgtggtctaaggattaaacagaaaatagagcagttgaatatamcactaattttcttttcttttcttattttacagattcctatgaccctagcagagtggagagggtgtgatgaaatgycggtggagcttgcattccgttgcgaattgagtattctcaagtagctggtagatttagtctatcagccccacttccccatgtagaagctggaagctgctgagtttttagcatcctgataacattctttaccactgccactaggaaacttgccatcctctcagaattgctttgtggcgataaagcaatcgtccgttgaaaccatctgtttttatagcatgaagatttaatgcctataattaggaaggagttttcacagaaaccctccctcatgacagatttgactaagctggtaaatagtttggtgttgctctcattctgggtgaagatttcaatgtggaagatctagcaaatgctttggaaaggcctgtgaatggtgtgctcccctctgtgtctccatggcctgcagtccatgctcttgtgaaggagkttgggacactggctgttgcccggtgtttcagcactttcagtttaggggaaatgtgaatcaataggtatgatccatttctaatcaatttggccttctgctgctggaagtaactttacttataagtaacttgccatcagagaataaaagcaatatcttttaagttcctgaaaaattaaaacttgtactgtaatatactaagagtattatttatctggcagtgaaatattttgatcatttgcaaacacgccattgtctgctttgcactcagtattatctatttttattttctgtatgggtatttagaaattctttatatgaaaaataattgctggtttaaaatagaccattttaacaaagtgactatatttctttttacgaaaatgctatttttctatgatgtaaacaattgttaggcggcagatttttaaggaagtattattttatttaagagtctgtatccctttgtgtgagaggaacccaaagagggttcacttttgctttaaagctctgtcccttacccactgacaactctgctacttttattttatcttagaaaatgtcaatatagacatatcacagggttaataaaagaaacttttcacaaagatttttgtacaagtgtagctatcaggttatatttgaaaataaccctctgaaaaccagccaacattgtcatgacaatttttgctgccgtatcaactagaattaccaaaaaacatagttttatctttgtatgtgtgtggggatctaccctgagaccatgcttttcttcccaccctgccaccccacccctttaaagaaatacgtatttttatctagaatgatcttgaattagtctctgcatatttttagaaagtgcttggggacattatatatatgccattacaaaagcattatgaggcctatgtattctactgtgtttaatactgcattaacctgcacaaagtttatgcattttttcatgcatttttttccttctttctaagtaaggtattcctgacaactaacattccctaaatcatttcccctccctccctccctccctyccttccttycttccttycttctgtcctccctcccttgctacctcttgccctccttccttcaccctgtcctccttttcccttttattttttccccttctctttcattttmttttcttttagagaaaccaccttatctatttttagacatttcgaattcctaaaatgtgaacygttgggtgatctgtcctttggccctaaaacggctggccgggctgtcccggcctgttctcatctgtaccgtatgattttatttcataataactttatgtatttggactgtaacaaacaaaacagaacctaagtcgccccgaaaaatctttccaagccttttcaaaacacttatctgcagtccagaattcagctcttatgaaaagtgagagtgcactccagttttcacagcagcaataagtgcrggaaacaaaaagatcctcttcccaggaaaagttgagtggggaagagttcagacactgttgtagctggtgaatcattgaagtcacctggtagtaccaaataagggctgaggcgcctggaggtctttgtggggtcttccctctttaaatgcaaacgtaagaaggtatatgtgtatatacatttatatacgtgcacatgtatactcgtacatgtatgcacacatacccatacatgtatatgaactccgttctgatttcctctgaaattttgttgataccatctaaatacctctttgaatcaaaataacttaattttagctcattcctcaagagaaagagaaggatccccaaggaagaaaaactgttgtaccttctgtgattctcaaaccaaaatgtgatgcgcttctgttttgttatcttaaattgttgtatcatatctttctgaaaccattctgaattaagttgaaattttcaacatttatactttaactgttctaaatttaagcctacatgtaaatcttttttggggggaaggtaacttgaaaagtttaacttgaaaatttgacctttaaactttcatattctaaggtaaataatagcctataacyaacaacagctttcccagaggtcttgaatttaacactaattgtttagttattgtttctatttctcatacatacataacttcgttttttgtggctggaagaaaaagtttctatattttgtatttgtctttgttcttctcatgcacacaatttactgttggtgtttaataatttggagctcataaarttaaaagttgtaattttgaccatttgggctaaaaattatatgagggattacatatgcaatggattagtatttcttgatttgcaaaagaagggaaaatgatggtaatttagctcaaattgcctttctttgaagaaaatttctgaatgactgaaaaccaaatatctatattatcactttcaacctcatgtttctgcaaagtacagaaaaactcctcactgacagtgcacccagcccctgactgggttttcaggattatgtccatgtgcataactgcttggatttcttcttttaaagtccctaaaacatgaatctgttctttgagatcctggtttccttagcagagttgtaggttgcgggtttcattcacgtggaaattctaagtagaacttttgctgccccattttactgttggtgaagggccgttgttaatggaagtttacgttttaaaactcagatgactcagaaaccagactgtgatcattttttgcagcagcaaaatgacttattctgacagcatctcggtttggggcttctgaagaaaaaggatgaagctgatctgttgaaacwactactttcccaactcggaggcaaaaggggctgatagaagataacattcacctaccatttcatcttgtgacccccagagatcacgtttgcgtgttctggctgagttttttattattgtttgttttaaatgrttaaataatacacaattaaatgtcaggatagcatctcttgcaaagtgaccagtgcagcagaattgtctttctatccatatttgagcttagagaaacatttcccatgtcctaagttcttagaagcaattactttagcgttggggagcattgttctaccagacccatttatgcaggggagatgaagcttaaaagacgggatgtggggtgggagtgtgtttcttaagccgaagctgttgcaggctgggggatttttgcattttctttttgttttgtttttgactgcagattctgtacatctgtctgtgggaggagagttgctactcaggacaggatttaagagacacattccagtgacctttaagaatctgcatggcgggaggtccttctccaggagtgtgggttggtccactctgggacccaccacactaagaagggggagatgataaaataacattaaaggaagaatggcctccagcctgcaggttttgttggaaagaaataaaaagggagtcattaagaccataaattcagattgaggcctcttgaaaaggttgatgtgggctagcaacctgcctgtcgaaacagtccttggttcatcagcagtgtgggaaggcagccaaggctcctgcagattcctggcatcgaccttggaaagcctctgcgatacttgtgtgtacgaatacagcagaggacagggaggtccttgttctgtggtctctgtttagtgactgaaacttaaacccaaaggcaagcccagattgtctggccgttcatccccatgctttgataggggttaggaggaaccctttccgtatgaaagacaggccctactagggcttacaaccaagccaaaggaccatctcttctttcttccacctcccttcacccctgccccrcagcagagccgagatgtgagacattcattgtcacggagcaaggagacaaaggcaagttcaagttgagaagcatatggcagcaaacagaaatgaaaaccatatgtcccagcaaggggaaaagcagtcatttccagattataaaaatcaatgaagtactctccacctaggtcagctgaaattcgagccctcacagtcaggcctgtcagagaagttaagcagaaacatctcggggggacttctaaaatttagtgaagacaaggccttgcaactccaaagaaactttttttcccccccttgaaacagggtcttgctctgttgcccagcctggagtgcagtggtrcagtcacggctcactgcagcctcaagctcctgggctcaagcactatccccacctcaacctccttagtagctgggactacaggtgcacaccaccatgcccagctaaccacagaaactttcatctcttcattttttctttgggcaccattaatacctaagacaggtagaaagggtcccagaaagacaccattggtaatggccgattgccggctgcagtcatcgcccccagatcaggctggtacaggatgccttaaggtgatgagaggtgagggtgcatgaagaataatgagcacagggaagagagaagcaggacaaagtagcagataaaatgccggcaaagcacagatgaatgtcttcaagaagctcttgtatttctctgcacagtgtaaatatccttgctatttcaggatggcrgctggcctgctcagtaacatacatgttccaaataaagattttgcatgaaagtacctatgtccgttgtcttttactgtgggtgcaagagctgccctagaggctggttcctgaagggcgggcagcaggctgcacggggagcagctcagatggtgtgggtaatgcagggacaggtagcccacagggttccagcacctttggtctccactgggatttcccgggagttaaagctcctgtttacatctcccccaaggcttactgacattgtggaaagaggcctagagttaatttgggaactgggtgtgaatattgactctatcaataaccatgtgactttgtacacatcacatccctggcttctgtgtcctccccagcctctcctaccaaaggaacataagaatccaatatatagagaacctccagcacattgtgggtgttgactgcatggagaatgaagctagagcagtgccttctggggaaaatacttgcctggaagtgttgtaggttttaccatccaggcctctgtcttgtagggctattctggaagcagagggagactcagtgcaacatcatactctccaatcgtttctattgtcagaccaataaacctctaagctgttgtttctgagtttttaaaaacayggtccttctttccagtgtaggcttcctctctctcctgtaagcttttgtaagctgttttcctcatttcttccttggctccacatgtgcagagccccaaagcttgagtatcccggggccctctaagtagtatgaaatttcagatcacaytaagatgtgtgttttaaagtaaggactatcccctagttggttgataagttaatccacatattaaaatataactgaaaaaaatcccttgaccacattaatgctagaagatgaaacacacaacccaggaattgggggactcatcctgggcctggctctgccattaactagctgtgacattgaccccctttccctggaacacttcatcctgyaagtggagagggagattgagctcagttagctggtttcttccaactctaagcttatataactattttctggcaaacctgaacgtccatagggtcttttgtcctgccagaagggttcaagagtaaaacaattggaaaactacgtctgtacgtgactgcggactgggtcatggccagggtgggagtcctgccattatttctctcascagggtggtccacttcccccattccagtaacttatcrtgcatctccccatcaccgtcgctatggcccagccaagggactgacaatattgaattctcctgacatatttttcttacgttagggcagggcactaggatgtttataaactgggcagtcagcccaaggcattaatctgcagtcacccacatagactgcttttctcactatttggctgctggggtccttttaaatacacttagttttggagatatttgtgtctcaccagctaaatcgcctttctgcttctaccccacacagcagtgtttccccaagtggtcagcttgcaattgactggctggaaaagctgccagtcctacagtcctacgttgctcagggttttggggaccaaaactccatgggaaactgagtgctagcccatatgcctctggtttggtttctgctggaaagcccagcttttcttggagttagatgagatttattctggagaccctggtcaatgtttcttcycttgacttccccactctstcctgtacattaaccgtgattgtttgttgtaattttttttaattttagagatggggtttcgccatgtttcccaggctggtctcaaactcctgggctcaggggatctgcctgcctcagcctcccaaagtgccgaaattacagataygagccaccgcaccggccaaccatgggtttttctacctaatctaactccactggtatatatatatatattttgagatgaaccttcactttgttgcccaggctggagtgccatggcacaatctcagctcactgcaacctccacctcccaggtttaagcgattctcctgcctcagtctcccaagtagctgggattacaggcatgcgccaccacacccagctaattttgtagttttagtagaaacagggtttctccatgttggtcaggttggtctcgaactcctgatctcaagtgatccatctgccttgacctcccaaagtgctgggattagaggcatgaccaccgcgcccagccccaccggcatatttctgagtttatgatagcaggctcagcttgtgtggaaataaacccaaatctgcatttacgggttgagcaccccaarccaatatgctccagagtccaaaacttttttttttttttttggtgggggggacagagtctaactctgtcacccaggctggagtgcaggggcgtgatcttggctcactgcaagctccccctcctgggttcacaccattctcctgcctcagcctcccaagtatctgggactacagrcgcccaccacctcgcccggctaattttttgtatatttagtagagatggggtttcatcatgttagccaggatggtctcaatctcctgacctcatgatctgsctgcctcggcctcccaaagtgctgggattgcaggcgtgagccaccytgcccggccaatccaaaactttttgaatgccatratgccacaagtggaaaatttcacacctgaccacatgtgatgagtgcacaaaattatttaagatgttatataaaattccctttaggctacgtacctaaggtgtgtattaaacatagatgaatttcatgttttggccggtcgcagtggctcatgcctgtaatcccaacactttgggaggccaaggtgggcggatcacttgagatcaggagttcaagaccagcctggcaaacatggtgaaacccccacctctactaaaaatacaacaattagctgggtgtggtggtgcacacctgtaattccagctactcaggagcctgaggcaggagaattgcttgaacatgggaggcggaggttgcagtgagccgagattaggccactgcactccagtctgcatgacggagtgagactccatctcaaaaaaaaaaaaaaawttttttttgttcagacttgtgttccaaaatatctcattatgtgtatgcagatatcccaaagtccaaaaaactccaaaatccaaaactcttctggtcccaaacattttggataagggatactcaacgtatacytasaattttttaagtatttaaaataaaatgcacaacatgargaagaggggaagacaaggaaactaacattgttggttccttactgtgggcatcgcatattatatgcattaattaatttaatgcacaccattttgtgggagacaaaacaggtacagagagactgaattattgcctgcagcacacagctagcagccaagcagggattcagacctattcacgttaaccccaacatccatgctgctccttttagcttgttatatcctaggaggatgacagaatgatcctctatttagtcatgaaattcaaaggtaacactcttacaatgctaaatgcatttgttaggattgggttaagctgcctatgccagaaaattgaamatagcagtggtttaggtgaagtggaaacttatctctctcacacttcaaaggagcccagagacaggcagtccagggctagcacggaagctccttggcaatcagggatcyggattccttgtatctttcttttccagcatcyttgcaatggcttccatcctgaaggcaagtaacctcatggtccaagatggctgctatagtrctggctatcttggacactttctaggcagctgacaagaggaagaattatcctcccagatgagttagcttcctttaaagagacttccaggaagtcctacactcttctgcatatacagtcagccctctacattcacaggttctgcatccacaaattcaaccaactgcagatcaaaaatatcaagaaaaagaaacaaaataacaakacaacaacttaagaatacaactatcacagtataataactacacagtatttacatcgtattaactatcataagtaatctagagatgacttaaagtttacagaaggacatataaatattatatgcaaatactacatcattttatacaagagacttaagcatccatggattttggtgtccttcagggacctgataccaattgcctgcataccccaggaggactgtattccatctgcaagaattcagtcacatagtcaagctgcaagggagtcttggaaatgtagtccacttaactgggcgccgctgtgkttctaaataagatcaaagttctgttgctaaaaaagagttacagtagttattgattggcaactggcaagccctgacacaattaacccaccaatgagctgagcattagccccagggcagatggaagctcactagacggcaataccaagcagcttgtgtgtgtcccgtgtctctgtgactractgatgtgaccagaacctcaaaggcagcayggatgattttgtctcaccaaaaaatgaaacatgctgccccaaagaaaaggggggttcacatctttaatccccccactytgggagactcaggaaggaggatcacttgaggccaagagtttgaggctgcagtgagccaatatcrtgccactgcactccagcctgggcaacggggagactttgtctcaaaaaaaaaaaaaaggttgggggcgggttagtagtgccttcagtttaacaagggagcagccacaaggccaagagggttatctgtaagcagttgtctgtgtaatttagttccagggtctgtcaagtgcaaactctcacattcctgggagatgccccttccatagaggaaatgactttgcctggacagtggcccttgctgttcataatagggatacatgagaagaggtgaatggcaaacacaggggtctagatgccaagtttctgggttctaggaacagcagacctcatccatcattgtgtgctctgcagaggaggctcttcccattttctgcagaggcagaggctgtacatgagggtcctaacatctttagaagaaaaccatcagggcagctggggcaggggcagctggtgggtgagactggggtcggggaagargaarggttaggactagatgacacagagagggatggaaccacacagacccctgcatcctactaggaagtccccaggaagggcctttgtcactgccttcctgcccgagatggagcccacagccttggaaattccagaacaggcctctctgttcagatatcaagtttcactcctgaatgctctgcctttctgtttcattctttcagttggtctcagttgcagaggaagcattctgaactcagtttcctggttattgagatttttatttatasagatacctctataaatccagaagaygcaccccaggaacagatttcaattttttttttttaaacgagactctgtgactaaaggcaaaaaygaaacaggtgccagaagaaagtgatgaaagatatcaggggcaaaattgtgtccaaggagaaagttcatgcagtacaaattaacatggcagcaaatattctgaaggatgtagactatcccctcggtgggtcttctcgatgaggaaggagagcctgggggactgtgggggaagacaactgctgtatttcatcacgcagaaggcacgccattttatttgcttcattccaaaaaaggaagacaaggctattgatgaaattactacttgccattgattataagtgcattccaatttcagagaagttaaaatgtgagagaaaaaaaaaagtgcccgtgcagttgatgaaatatggtaactaaccttcattcatttgctttttgtggttcggcaaatatgcctgtcccccatgcctcccgtggagtcccttgctgagctggttctggaagaccctgtaagacttgcactgcaagagctccccggccattacacacaagcaatggagactctagggctttggctatcaaacttcaacttgtatcccagtgcctggaacgcgttaaa

SEQ ID NO: 1589 - DNA, 57085 bp, Homo sapiens
ttgatctatcatattacctaccaacatatttatctacctatgatatctatcaatcatctatcatctgtctattttatcaatctattatctaactcctctgtgtttttttcttcacatgtaaaacattttccacagtcttattgtttagaacactgtatcagtctgttctcatgctgctaataaagacatacccaagactgagtaatttataaaggaaagaggtttagttgactcacattcagcacagctgrggaagcctcaggaaacttacaattatggcagaaggggaagcaaacatgtccttcttcacatggcagcagcaaggagcagtaccgcgcaaaaggggggaaaagccccttataaaaccatcagatcttgtaagaactcactcactatcacaaggacagcatgaggttaaccacccccatgattaaattacctcccactgggtccctcctatgacacgtgaagattatggaaactacaattcaagatgagcgttaggtggggacccagctgaaccatatcaaacacaaattttggaaatgcttttgtaagggctatttgattcacaattagatgttttttaaatcctaacttaatggaaggtgtatgtccagggaaattgctgaccctagaagataatgtagaacaaaccaatgttatttattatcagatttcaaattaacaagttgtttgtgaatattctaggctactttgcctcagtatatcctgcatccaaaggaagcacacattaaattgaaagaacattgaaaagtagtatgggtctttgtaacattttctccaggaagtgatgagagattcacaacgttccccccgccccgcccccattcatgtgtcctctcttatcgaagttccactttccaggcagctgttcagctgttttcttttcctcttctgctgcccattgctgcatgctgggtttgtcctttcattccccttcttctttctttggccaaggtcctccaaaagtccctggaactggtggcctcttttgcgtaatggtcaatttagcctttctttcagtttccaaattgcctctctactcttgggtcctccaagagtccctggaactggtggcctcttttgmgtaatggtcaatttagcctttctttcagtttccaaattgcctctctactcttgactcctgccccagcataacaaacaatctcttagagaataaaaattgcaaatacttttgatatattttaaatccttcctatgtaagaaaaacctgaattaaatgggtgctaacaaatgttacaatcctgtgaatgtcatgcatttttttcagatctttaaaaattgatatactgtatttaatagaaataagaatactcatagtttatctactgttaaagcaaactaaatatggcctgagaaggactctatatttccatatttgagtccttgtgggcaaaccataacctaacttagtcggtagaaaagactgaaaagcctaacttaggtgtatgtgtctataacaatagctgagtcttggccaattcctgtagtcatacttcaaccactcatacactgctgagcattcaaactgtgttcaaataaggcaaacatcaacgtgttaccaattcagctgtttctgtacctcacttccattttctgtacatcattttcctttttctgttcataaatcttcttccaccttatggctgtgctggagtcttcgagcctgccggattcatgaattgttcattgctcaattaaactcttttaaatttaattcggttgaagtttttcatttatcactactaatcattttatgtatcacagagaaagaaaatgctgccaatttctccacatcctctccagcacctgttttttcctgactttttaatgatcgccattctaactggtgtgagatggtatctcattgtggttttgcttttacactgttggtaggactgtaaactagttcaaccattgtggaagtcagtgtggcaattcctcagggatctagaactagaaataccatttgacccagcaatcccattactgggtatatacccaaaggattataaatcatgctctataaagacacatgcacacgtatgtttattgcggcactattcacaatagcaaagacttggaaccaacccaaatgtccaacaatgatagactggattaagaaaatgtggcacatatacaccatggaatactatgcagccataaaaatgatgagttcatgtcctttgtagggacatggatgaagctggaaaccatcattctcagcaaactatcgcaaggacaaaaaaccacaacaccgcatgttctcactcataggtaggaattgaacaatgagaacacatggacacagggaggggaacatcacacaccagggcctgttgtggggttgggggaggggggacggatagcatttggagatatacctaatgttaaatgacgagttactgggtgcagcacaccaacatggcacatgtacatatgtaactaaactgcacgttgtgcacatgttccctaaaactcaaagtataataataaaaaaagaaaaaaaaagaaaatgctgccaattatattaaataattgtaagcaccacagattatgaagtgttccaattttagagatattgaaatattaaaaagtgcatcttaggaacaattaaatgcaatgatactttaaaaaatatattctttaataactcacatatgttttagacaattatatttatatgaaaattccatagatgattttatcctttctagaccagttttcctccaattgtggactatggattacctgtaatagaaatacctggagctcctcattaaaaatatagatttctgcccctacttccctgaaggttaattgaaacggaattttgtggcagggtctgggcagcaagatattttaagattttggatgattctaacatgcagccagaggagagaacttttcaacagtggtccccaggccaatagcagtggcataacttggaaacttcttagaatgcagaatctcaagccccagctcagatgtactaaagtagaatttgcattttcacaagatttccaggtgattcataggtgcatgaaactgagagaagcattgtagaccaggagttctgaaagttgtggtttcaagaccagcaacggcagctccgagagacttgttagaaatgcsaattcttcatccccaagtcagacctcaccaataaaaaatctggggttagagtsgtgatatggtttggctctgtgtccccacccaaatctcatctcaaattataatccccacatgttgagggagggagatgattggatcatgggggcggtttcccccatgctgttctcgtgatactgagttctcatgagatctgatggttttataagtgtttgacagatcctcctacatacactctctcacctgctgccatgtaagatgtgcctgcttcccctccaccatgattgtaagtttcctgagtcctcccagccatgcagaactgtgagtcaattaaacctctttcctttataaattaccaagtctcaggtatttctttatagcagtgtgaaaacggactaatccaagtggggtggagctcaagttatctacggttttataagccctccaggtgattctgatgcatactaaagtgagagaactattgctgtagcgaatcagattcatgcaaggcaaagggattcagctggtggcagacacctgatttgcagtcatggtgattaagaagcattaactagcatctcaaaggctaactaagcttttaatcccggatattaaaataatagcagatagaacaattgggaaaagacaggacataatatgctggtgaatgttgatctctcatttttaagtgagtcagagagtgataaatacattctaagcctcaggaatctcttctagctttaatctcttactctagcttttgttttgtttttctgactctttagagcctctgtgacaaagccatcatattatgagttctctatagtagctaataagttctactttgaagtgctgccaacttccaactcattcagggcaaaagagttggtacttgatatttcttttctccactcttataaatgggagagacaataaaatgaaggctttggggaatgattcattccccaaacttgttattgagcatctaccacaggttagacgatattggatactaaaaattcaaagatagaatagcagttattttcctcaaggaacatacagtctattagggagacagacataacaaataaataatttcactgcaatatgctgccttgcataatggaggcataaaatgatcatttattataactggcctgacagtggtttgaagatgagaataacaagaaaagaagacaagtaagaagctactggaacattttaaccaagaggctaaatagtggcaaaagctagaagggacatctgtgtgagcattttctttctttctttcttaattttttgtttctttgggggttttttgtggtaagcatcttgtaaagcacaataatttataatcagtgattgatcccattgtacccactgaaagtaagaagtgactcaggatatccaaaataagtttctaaacattctctgactttgggaggtttctgaaagtcatgtttttaactatgcaataagtgtctgatgcttctcaacatgccctttttattatctccagcattccatgactatactgtttatgctagtattatgcttaattaagcaccacgacaataccaataagagtctgaaagcaagacgtggcacagatcatccaaaaatgtagctatcctggcaagctgaggataaaccttgcaaaaaaaaaaaagctgcttcccagaagttgttttctctttaattaagattcaaacgtaaaaggttgtattccaaggataaatgaacatagtgatcaagattatgttagtagtctcaagcatttakaaatacaataccagggttactgtttttccacaccaataatggtatgcagcttcgtataattgggaagggtacctttatgctttatgaacagaccataggaaagagggcctcctagaagcatgattttctccagggatccttttctaaccctctcagcctgagatggttccttcccaacttcccacgttcttttagaactcttcatacctttcagtcatagcaatcatctctctaaattgtagttactgatttattgtcccccaccaataaaaaccagaagggtatttgggatatgtttccttacatgaccatcaatcttcttagccattcattcactcattcattcaaaccatatgtcaaggtgttttggacactgggggtatagaattgggaaagacagacaaactcagctgataaggaactaaagacctagtgaaaggagagagatagttcaacacataagcaggtaaataaacaaatgactgcagagagtggtaaatgctacacaattaacaaaaaaaaaggcaatggggtagaaagaaatggggtargggagggatcctttggcgggagtgttcagagcagggcttcctgagatggtgacttttgagctgagacctgtcatcatgagaagatctaggaaaaagagcactccaggcagaaggaactggaaatrcacaggccctgagacttcctgtgcttggaaatcttgagaaatggaaagaaagcttactcagaacacagctgtaggcgtgagttggggagaagatggtagatgagggtggagaggtggacagactctagaacatgctggctgggccttacttgtagattatattaagaacagaagattttgttctaaattaataaaaaaaaaatctgctccagacatcagcctgctgacaaccacctgtgctggtgggttgttggcaggctgatgtctggatcagatttacaatttaaaaagaacactctgaccattatatggagcacaaaagaaggtatactatttaggaggtagctgctgatgtccgtggaaggatggcttggaccagggctgagcagtgtgggtggcaagaagcgtgttcagatttggaggttttgccaatgggacctgctgaygaagtaagctgtgaaggaacagagtatgactctcaggctttggctttaagcaagtggctagatggtggtgccattttctgagactatatgaggaacagattgggaagggggatatcaaatcaagtgttcggtttggacacgttgagtttgagaggcctattaaacgtccacacctagtgaaagggtttactaacccagagcaaatcaaaaggtggaggttccccttaatatttttctaccgctgtgaaaaagcagttagaatcttggcccttggagggagaatgacctgagtttgtaccccagttttcctacataaccattttggataactgttctgtttgagccttagtttccgtatctggcaaatatatctatatcatgggattattgtgaagattaaatcagatcatggatgtggtatatttatagagtacctggaccacactgagtgctgaaaaatgataccacaaactgacggctataatggtggtgatgaggcagtgcttaaggtgacaagtgcagagggaggtttcactgccaagaagaaaaagctgtgtccactgcactgagtactgtatcaggagggacaggaagtcgatttcttactaagcaaggcctttcttctcaggctttaagcttctagtgcttcaggtattayaagggccaagcctattgaccagccaccatactacaatagattcatcygcctcggcctcccaaagtgctgggattacaggtgtgaaccaccatgcccggcctggcactgataaaaaatgctgtaactcagtcaggcctggcactgataattcttataaacaaaaatgctgtaactcagtcatctacagtagtctcgaggcaatagaattattcagaacattaacttctcttcaggtttaaaatctacagagaaagctttaagattctttggyttagtagtctactcaataagcagttgtggaaggctgatgttcatagcatgaaatttaccttcaagaatcttgcattctgccgataaaaccagatttctaaagaatgctaaaaattgtcaacagacaaggagaatacagagaactgagtggcttgacttctatagttttacaaattctcgatctgtgaaaagtaacacattttgggagtcaactggaatttaaatgaagtcagggattgcaattaaaattttttccttagatatacttaaaaacttctaattgaayggttgataagttacgtaaatattaagctaacctaagaattgtgaatggaagaaaacttttccagtttcaggtrtgtaatgagtcaactatcaaagcagataaatttgattgataacttggacatagtgcttacgtttaggggaaaaaagttatcttagttttaaaatggatccagctagaatcttctacttacagttcacagaatcacacatagagtaaatagatgaatgaactggtaagttttagagcatgtggtgcagaataaatgaagcagaaggaamagagggaagaaactctggaaagcttctgggagaaaggagaactgaatggtaaagaaggcaacggtggttaggatgaaatgcaaagaaaattcatggactgcaaggttttaaaagctctctatgttttttctttagatgagaaccctgccattattttcaaagaagagagccaaagaaataagctccagagaataaaaatcaagattacaaaaccaagtcaggcatagagcctaaataaatgcttcacaaggcatagatttatattcacctctttgttattccctaaaatgtgatttgagaataaatgtggataggagaaaacttttccagttttagggatgttggaggataagaactgatcaatattcaggaattaaccaagagtgtcaatccaggacaaaaatgaatgtgaacagctgtgtttcccaatttgacttcaggacattggatctttagtatttccataatatgactataaaaaaatgtccctctagccttattgctttccttaatggataatgcttttggcttggatctttgtgtggaaaaaaggatcttttgtctcataaaatgttacagatgcttctatggtaacacattttaattttattcctatctcagaagataaacatggaaaagtgcaattggcaatttaatctaatatttagcattagctttaagtccacagagcattttggtttttgttttaaaggaacattggcacttttgttaacctgctgtactcaattargcaaaatcctgaaggcgtgtctaaaaggtattactttgccaacttaaaaataccatgtggccaagttttaaaacccgtaagggaaagaaagcatgccacttctaggacaaaattcttaggtggccaraatgggtttgtatttatgggaattttcttctgggctaaaaacaaaaaccaaacatttcagcatttacaaagacagtatctatttggtttgaaataaaatccgcccgttaartagacagacaattattgaatggttgttctagtagtaagccccgcaacatattgcagtaaaacttttgacagtaaagtaagttgtttactttgtactcggtaaataaccaaggttattgcattcggaggctgtaatttgaagcccggttccctgttgaattrcaacgatatacatttacacggtagataaaggcttccatacttgccagcatcataaagcaaggcaaaaagcacaagaagggaagagacaggaaacgtggtcaatattgcttggcaggaattaaaatccygtgacgtttcttctagaattgcaaagagacacaagcccctgattgtatttttcaaaagccatcagtcccacttcacaatttttattattttctaggcagcagaagagttaatgaagggtgtggtcaatttatacaaagtttcagttacaaacctgcgggggtcaagtctgatgtagattcaccatatgccgcactaaccagttccagagcacatttggcctgcatctsagacaagaatcctgattcattcattacatgattagagaacgtgcagcctgcttaattttagttatcttagagatctttttagaataataaaaatcatcaccgttactgattcatacactgacatttagaaatttccataatgagtgtactaacactacagcccttttgaaataccacaacatatgcaagttgctagtaattaaactgaagtgcctacctaagttgttcttgaagcaaacttcagccctttgtaatattttcccttcataaaagtccccaagtatttacagtctgtagatgagatcattctcttgaaatggtaggattaaatgagaaggcgaatgagagtcaaagagaggttgttcacactaacactactcgtattgaaaagattccacggcactatctcagttctcattggtcacttggcgggctggaacaatatttgctccagttgctatgtagaggggagtggctgccagttcacttcactaatgagcctgaacctgtcctctgcagataagagtagctattgtttgagttaatgtgcttgctgataagatgctcaccaaggcaggtaaaggagatatttttcttttgtaaacatctgtagagctgctacagatatttctctgtcactgtccgaattttaacagctgttgcaaaaagtaaaccagaccaggagataatttctttcctttctttcttttttttaaattagtctttccttcttcaggaaggcacatctatctaaaagatcacacttaaatgttttcctaaaaaggacactatccttaaaatatagaacaactcacacaccccaactctgaaaaccaattacaatatatttaaagcawtccatggtactattttatagatatataatacatttgtagaatacatatattatatataatatgcatatataaatatttacatataaaatatacatatatacctacatacacacatatatttgtggaagttattttaggaaaaatttcccaaatttcaaatgaagtagtttggatttgcaggtaccttatacatacacaaaccccatcactaaagtgtgtgtgagcatacataatgcacacataagtatgaaagtttgaataatacaggactaatgtaaagcacatgtcaatttaggcagggtttaaaaaaatttaaagacagatgtttttctttttgcatttagagaaataccctatttttttcaatttatactcaccatatgcatttttgtgggattgtgtgaaggaaagacttcaaatcctgaattgaacttcatataatgaacagaggtacatgaaaacaagaatattcaatatgcctttaatgaccaatttttagtgtacccaataccatgagaaaaatggaataaattgcttaacaagtaggatgcttttcagtgttctgctatagaatttctaaaaatgatcaattatgatggaaattatctatgtacctctaattttctctttatcactaggtcgataaagcctaatgatttttttgytatatatttattggttactaatagaaataaaaactaataaactaatatattcataaaaccaaaagggcccatgttgctttaaactctggcctagaatagtaagaaatttcarcttttatttagagtatttttaaaaactaaaatgaaaaatatttgtagataattgaaaagaatctcaatagataatccaatggaaaagtttgattttttaaaatcacttcttttttaaaaaactttatagatttaggggatacaaatgtagttttattatatggacatattatgtagtggtacagtcttggcttttagtatacccatcacccaaatagcrtacattgtacccgataggtaatttttcatcccccctcccatcctcccaccttttggagtctccattgtatattattccattcactatgtccatgtgtacagattgtttagctcccacttataagtgagaacatgtagcatttgactttgtgtttctgagtcatttcacttaggataatggcctccagtttcattcttttttatggctgagtagtattccatggtgtacatgtgtgtatattatatatattatatataatgtataatatatatatctacatacacacacacacacacacacacacamaccacattttctttatccaatcaaccattgatggacattggacacttaggttgattccacaattttgctttccatttgctttgtggttttaatttatatttctctgatgattagtaatgttgagcattttttcatatgttttttggccatttgtgtgtcttctgttgaaaaatgtctgttgattcctttgtctacttcttcatagagttgtttatttcttattgagttgtttgagtttcttgtagattccaattattagtcgtttgtcagatgcctagtctgctaatattttctcccattctgtaggttgtctgtttactctgttgactgcttcttttgctgtgcagaagctttttagttaaactaaatcttatttgtctatttttgtttttataaaaataattttttaactcaaacatgtgagaaccacatgatgctactaaaatttggctacttacaaaatggagctacagagacaactcactgttcaagtaaggtaataaatgctcatagctagaaaaagtgctgcagaatgtggttccagttgtttttctgtgttgcctcctcaattaagacaacatgtttcctgaggaagttttgaaagaacaatctggtgtatctctggcttcactgcatttgctgatctctgttgggcctgaccaatccacactatccagaaacacctcatcatgtgttcatgaaaaacacacaaataaatgagcccaatgtttatattaatatgcagatttcttctgcttagcactttattttaatagctggttaaaactaagagtataggaaaataatgagatggtaatcctcacgccactgtagaaagaagcatgctaacaacaatatgtttattgaacagaacatgtttgtatcttcatggactcttcatggactcaagaatcagtacaatttccatgacataaatatgtggagatagctgagcatggtggcttatccctgtaatcccagcattttcagaggctggggtaggaggaactcataggactaggagtttgagaccagcctgggcagcatagggagaccccgtctcgacaaaaatataaaaaattagcygggcttggtggctcatgcctgtagctccagctacttaggaggctgaggtaggaggattgattgaccctgggagatcaaggttgtagtgagctgtgatcgaccattgcattccagcctgggtgatactgtgagactctgtctcaaaattaaaaataaataaataaattagtggaattgattagtatagataaatgtctccctgtgaaaaactgaaagaattgtattctttaaaacaaggtctaaatctagaaaagaaggtaagctgagtttggtgtttctaaaaatagattactttctaataactgataccttagcactcctgaagaatattttctgtgggatgatggccaaagagattggctaagtgctaagagactatattatttatcctatgttatctctgacctgttttgcactattataaccaatagtatccagaattcagtcacaggacaggtcaaaagttctaagagtattttaaggaagaaaaaaaaatccacaccattatataacacaaaacacactaattctgcaacagccactagcattatttggctagatttagaagtcaaaattttctcaaggctataaaatttcatggagcattaaaaaaatatgacaaggaatcagcttttcaattatgacagctttacctttcaattcaatacagattcttttttatgagctcttctttttcatgaagtggggtgatggtgacaatgtaaagtatattattcactaataaactagtaataccatgaagcagaattgagcttctaggagtggtcttctcggagtgtaaatctgcacctgtgttttcctgctggaggacctcctggctttcccttgacctccagatgacattagacctggccacctgacctccccagtctcctcatgtgcctctctctggagctcctctggcttaagtcaagctggataggttttagctgaatgaatgcaccgtgttctttcttacctccaggtttgrttttcttggtctggaacaccttccttcctgacttatctctaagcctcctgcagaggtgttgcatctcccccagctctgtgctgcactcatcacatgtgtaattacttgtgccgagagcatggaatggtctctaaatatccccttgtatccccagaggctactgaaacatctagcctataataaacattcaatgaatatttgtttaatgaatgtaagtttgaacaggaatagttgcttttgttggtggcattggtcagaaaaaaaaaagtgaaagactaaagcttcttttccttctattgtttgagatagggtctcattttcctcccaggatcactgctgccttgacctcctgggttcaatccatctgctgcctcagcctcctgagtagctgggactacaggcatgtgccaccatgcccagcgaattttttttttttttttttttggtagagatggggtttcaccatgttgctcaggctggtctcctaggctcaagcaacctgcctgccttggcctcccaaagtgctgggattacgggcatgagccactgcacccagccaagttttcttaagggtaatataatgttaaatttaagaaagtatgtggtccccttatgggagcaaatatgagggtggatctgcttttgatcaatgtagagacctatgacttaatctatagtgattttctctaaaaacataaatatataaacttgaaatgaataattacattaatgtccttgagatcccagagaaattcattttgtgcatatataatagtacatgtaatttatataggctgttattttattaccataggtttagcccccaaatgtttaaatcctccatggatttctgtcattagtctcagtcaagaattttaataggcattatataatccctcctcgaccatatatagaaaacatcttgtttagtctatccacaattttagattatttcatcttttctagtaagaccttgaagagcaatgcatttcatttgtatttctatctgtgcctaacagtgttatgtcatagacactgaacagatccttgctaagtagacaaagaaataaatgtaatatgcagttatatgtttatagaaaaaattgtgaagagatgaaatgctaacgtcatggtaggttgaaggagaataggtcacctcacttgagacactggttatgttggagtctacgtgaccttatctaacctcacctcgcctctaagaagcactggctttattaacatttgaacaaragacctagaaatgttaattcaggtatctcagtaactgttgagtgaattccctgtgagtcacatttggatactatgaactatgataatgtcatagtaaaggacagctaggctcagaataaaactctcatctyctcatcctaatgaagcccagagagattttcttccatgtggacagacaatggagactgggaagggtgaaggctgggagaagggtgatgaaggcagactacttaatgggtacgaggtgtattatctgagtgatggataccctaaaagctctgacttaaacactacaaaatctatgcatgtcacaaaattacacttgtaccccataaattcatatgaataagtttttattaaaaatgtttttcttccacagaactagagttgcttcacaattcttggtcattagtagaacacagacagacaatcaatgccttgagaaagagatttatataatggagaactacctgttcttggaaaatcttagcttgtaactcacatcacatcaagcaaaagttttttataatgcattatatatataaatagggaacattaccactttttcatatgactttaactgataatgaacagtttgaccttgctaaaatgtcacacttgaaaatctacattcatttaaaagacaaattaaaattactaacaaaagaaaaggctgaagaggaaaattggcaaatagttttatatgtaatatttttggggtttcttgatgtgctcagttttactgagatttgactttaatcatggagatggagtgatgtaatagaaagatatctgactgacagcatgatgtttctggttatggtctatgtgtctttaaatgatagagaacctcaaggctctgcctaagtctcatttcctagcagaaaagacatgcctttaactgccttatgtaagccacttctgatccctttcccccgagctccagattcttacgtacaactgctctgagatcactagtcagatgcctaataggtatctccaacttaacatgtctaaaacagaagcttgacaccaactgtcttctcaaccacctgcctgtgaaayctgcccacccaccagttgttcccatttcagctaacagatccactatccactcacttgctcaggccccaaatcattatttattcttctgtcygccactccccacaaacaatcttccaggaagttcttccagctctctctctaaaaatataccgcaaatccaacttcttttcaccatctccacttctattttccgtttggattcactcatctcttgcctttcacatacccttctatatagtccattctctacacaaacgatggagctgcaggcatcttctgaaaacaaaacttagatcactcttctctcttagaatcatctaatggcttcccattgcaattagaatgagggccaacctcctttccacggcctagagtccccacacggctccattcttttcagggtcacctcctggaccctccatgttcagccacactggcctccttccctctcttcaaacatgcctgtctcattcccatttcagtgcctttctctactggttttcttttccagcaacactttcctctcagctgaactatttctttctcagggagatctcccctgaccacaccacctaaagtaatcctgtagtcctggttactttccagcctgcatctttatctttttcaagaacttaacaccatttaaaattacattacttacttatttgtttatgtatttgctatcwttttcctcttgccagcacataaacttgaaggcagaaacctaatctgtcttgttcatagcgatatctccagtgcttagaacacagacttactcctgaacttctttaatgatggatgaatgaatgaatctcaggctgtacttacctcctctgtgcctttgtttgctactttaaacactggtaggtttagaaataatatatgtaaatcacctagtacagtgccagaaatataaaaggcacagaacagatattcggtgactgtagaaatgatgttcttcctatgactcatggcacatactggaaggtaatttgatagagtgaaaagaggcttagaattagaagtacggtgtctgcattcctttttttttttttatccttgtgacctttgagccaatctttccacttctctgagttttaagttcatcacctgtagataataatccagctgttatgagaataaatatttaggcaatgtctgtaaaagtgccttgtaaagtgtaaagtgctgagcaaatacatrtaatttaaatattattatcatatggaaatatctgttgattagtggagggaaaagtcacggtagctcttttttttcccacggacattcctcctgaaataattaagtttatatatgttgaagtctcaatactggcctcatttcagatgaactacttccccygaatatcaatggatgggaaccactctacttcaagtaaagctaagctttggaaatcctctttaaagggttagaaaaataataagagaagtttgaataatctgtgagttatatgcatgaatgaagattaagaaaaataagttaagaaaaaagcgtatgaatatgttttgaatatattttttctaacttgaaaaggatttttgaaagttggtcatctggggctgggcacagaggtgcagacctgtagtcccagagctttgggaggccaaggcaggtggatcactttaggccaggagttcacgatcagccaagtcaatatagcaagacccctatttccaaaaaaaaatttaaaaattagctgagcacaatggtccattctctgtagtagcctgtagtcccagctacttgggaggctgaggtaagaggatcgtttaaccctagaacgtggaggctacagtgagctgtgattgtggcactgcactctagcctgggcgatagagtgaggccctgtttcaaaaagagagagagaaaaaaaaagaaaattggtyrtctgcttattagcccttattaggtagtgtatctgtctatagcaactttgggaaaggaaggggtcttggtggtgatttgggcttcactgacttatccttgactgcatccagggaggcctcagagcacagaacccaacagaactgggttgatatagggctgctcatgtctcactgtcatcatcttggctccagggcataataacaggcactgaaatgcctccctcttgactgcagatgtgttttcctacttttccactgacagtgcttcctctattattgcaggcaactctgcttttcaaagcaaataaatcataaccaacagcttagttatgctagagtacttgtgtgtatgtatgcactttaaaaatagaataaaatatttgcccatatccagagtgggcattcaactggtaggtcagctttctgtgaatatggatataagggttaaagcttcctaaagacagggttagacctgccttccacaaaactaataggtttggtgcttatgacagtacctggcacttactaggaactcaaatgttggttgaatacatgtctgactgggttaatgagcttcttctctgatctcctgacagcttgatacagaaaccggtactatggggacagagactgcttgggaaagtgctatgaatcacttaaatcattttaggatcatttaattcatttggattactaagagtaatttcttgatactcatactcttcgtcttccaatttaaatgaaacttttaagagaaagtttcaaaagaaatctgtctggttcaaattatgtgtgaacctgatactaggaactgctgagtagtttcagattacactgtcaacattgtgcacagttctagtgctttccagcgtctgccttgtttccagctgcagtgttactggacaagaagaacttcattcttaaaggattcagtaaggtgatgggtgtcactgtgaaaagcaagcaactggccttgcagaatgagacagttttcttgtttgagaggtcatgtacttcacttagggtacctgaactattttattgaacaacaagctagaaatctaattatgggtcttcagaaagaacattctacaacccatttcagctcatgtctgtcatgaagttgctgcattgatcattacacccctttatactctacctgacagcatatattgagggtaccttgaattacttctaggaaatatacattgaaatttgtaagatgctakttgaatttcatatgaactcaaatattatttttaaaagcgccaggtaaaattcactggtttatatactgcttgcttgcatgctctctctctctctctttctctttttttttctctctctctttctttctttttgagacccggtttcactctgttgcccaggctagagtgcagtggtgtgatcacagctcactgcaagctcaacttccctgggtagccggtactacaggcaggtgcctgtagtagctaggcacactaccatatctggctaatttttgtattttttgtagagatggggtttcgccatgttgcccaggcctgtctcgacctcctgggctcaagcaatccacccacctcggcctctcaaagtgctgagattataggtgtgagccaccacacccagcctatgtattgctttcttgataagactcaaaagttctctgcaaatggctctgatattatcactataataatgttcttttacttgaaatgtgcatatttaaacatgttatcttaaaatttttcagctatgtttgaattttgatataattccatttctagtgattaaaattcagtgtcaaggtgggggcatagtttactcgttcatgagcaaatagtttctgtatcatttatcagaagggttgggtcaatatctcatgctctgtacctttaatgatccttcttttcagcaaaactgacctgatcttctctatttgtgtatagtcttgctgtggcgttggctggctaacttgttaaactaattagagttttcagaggctaaacagtcaacatgaagtgactgaagaatcttaaggcagatacatcgggggaaatacagtgtaaaaatcttgttatggctaaaaatccagagttccatttacactttactatgtttttccagagaaaatatttctgcttctgttaagtcatttgtaattcagggtgagttaaaagggggagatttcatgttggaactaaaagaaactatattagggtaaatcaaatcatatggataatctattcattccaacctagtcctgtaataacctctcagtctgtgatttcaattgctatgtggaaagttacattataatttgaaccttgtcattttataaacagagaaaaaagacacacctaggtcatgttttacaataaatggcaaatcattattgcttcctttggtatttcctttgtaatgttgattatgatgaactcctggcaccatgacaataaatggcattccaaagaaattccattttcacttatgtaacaggatgttagaatggggmtcctctggtctctgcttcaatggaagcacaagcatggtggtggataatgggtacccacgtgtatctgagacagatccatatatttggattttcaaagaaaggaattaaaaaccagttccaagactcttgggcccttcagcgcatcaaggatataaaaagtggtcagagttcggagagggaagaagggctggtgaagagactcacttggagagagctgctgccaggcacgtttctgtttgtgaaagagctgagggaggggtgttatctccaaaccataagcctggtgatggaggaagggccacctctaccgctttgaaatgccttccttgcatgtgggatacccagagggctggcgcctgactcctgcctgagaaaggtaaagtgtaccatggactggggtctaacctgtcctggaaagtttcacaggaaaggagatctgagtgcctttgtgtggaggagccagggaagcgctgatctgccagcactggttttcacttgcagtttgggggccagagctgggggatgagtaaacatgggacatgaaggatggagctgctgttggtacaacacagtagcccgtaggggkgagaggtgacctcatcagaaaaaggctgaagatgaggaactgatttgcaggagctgaggaaggagtcccaaatggccattggtaatgaggagacgaagggctctgcataggctctgtagagcctacaaagcactcaatgagaaaaagagctggttttagccatcaccaggaccagagagagcaaagctacccagccaagtaaggattgtcctatctccccaccttccctccctttcccacatccctgctggtaggaagtgcacagacaggggtgagcagggagagattaacagcaggagggaatccccctgctcacagctgactcaagcctgaagtaggtcctaactggggtaggggagaaaatctcataccacaacaagctcagaggtttgagaattacatgggattaggccttcttactactgaaggagaccgtgcttgagatttaatgcacatgtagggcaccttacgtaacagtggatagtgtctatgtgtttccacattgggacacaggaagattactgcagtccaatggaataagtttaaaggggtaggggacaagaggaattgattatgatttgtttacttcttgagttgtcctagtccaacatattgattatgcctggaatgaactaatgaatatgatttaatggctgtagtttcaaagttaatgcttacagagagaaatagaagaaatagtacaatagggatccgttgcttggaaatggtctaagatttgttggaatattctcagatgcrtggaactctatagggcaaacgtatattgaacgaacaagtggaggccgggagyggtggctcacgcctgtaatcccagcactttgggaggctgagatgggcagatcacctgaggtcacgagtttgagaccagactggccaacatggtgaaaccccatctctactaaaaatacaaaaattactgagatgaggtggcacacacctgtaatcccagctactcgggaggctgaggaaggagaattgcttgaagccrggaggtggaggttgcagtgagccaagatcccgtcactgcactccagcctgggcaacagagcgagactctgtctcaaaacaaaacaaaacaaaaacaagtggaaatgtgagttgagagcccattgaatactgacagttcccgggggaggctgattacaggaacacttgctctgcttcctgccttctaatctgtgcagggagctgtctagaataaagtagggctataaaccacaggcagaagtagccacttcyaggcttcatgccttagtcacgagagtatggagtaccctgcacctaagaggcaaagagacatcggggcagccccaaggtgtgacacttttcctcccatctttttctctagcacaaatttctgtactttcatattttctcagtcttttttgttaggctggtttgaattaagatgttaagactgatagtaacaatgatgttcctctcaagcatgacttaaatgacttaaaaaataacacagggtaagagtcccagacttgtgtggggatggatagtttgagcttttaaaaggcaggctaccaagaggttgatttgcacacattgaaagcatcctgcttcgctggtacaggagtttcacttccggaaagcccatttttaaaaaatgaaaaatatatgtgaatggaagagggaaaacactttacctttttcttcacttcttcttcttcaacttctggtccctattttaaaaggtattaatatggccgggcgccgtggcttacacctgtaatcccagcactttgggaggcagaggcgggcggatcacgaggtcaggagatcgagagcatcctggctaacacggtgaagccccgtttctactaaaaatacaaaaaattagccgggcgtggtggtgggcacctgtagtcccagctactctggrggccgaggcaggagaatggcgtgaacccggggggcggagcctgcagtgagccgagattgcgccactgcactccagcctgggcgacagagtgagactctgtctcaaaaaaaaaaagggtattaatatgaactccatttacgaacactgactatactatgtgttagaarctgtgctaagaggtcttaaaccttttctctctctaatccatgatcccggaacttcggggtggttctatacacattttacaaatgaggaaatgaagatttaagaaggttaaatagggtgtcttaggttatagagttaatttgcatctgagcctgsaatcgatccctctttttgactggatccctaggtcttaacaactatgctatccagaggtaagcttytgaataatttattaataaggtgtcaagatgggccatgatgctgaatacataaatggataatgagggattaaatcaactgctttggaatgaactgcattttgtttctaaatgtgttatgcttggcaagtctattctgaaatggaacagctggtctacttacttttgcggcactctgcctcacctgctggtttaattgtgtaacagaaagtggagaaagagatgattgatctgctaatatcagatctttcattctaatactcatattcagctatctaaaaggaaaattagaacacaatcgccakgctgctctggatagaacccagggagcagcaagttttctcagcaaagcsggtccacagagggctcgctgcggtgctcaggtctgaataaartggttccacctgcagcaaattacccctctccccaccaggcagattcagccatcttcctcctttttagttagggaaaggctggaacctggtatggatttttctcaggcctcaacccttagaaccagttttagtcttctttggtttctgtggttctattctctatgctccgttcctaatcagccttracagatacctgcttcgctttcattgctggcacttaggacttattcacaagttcaattcactggggaaaacaccccagggaacatccttaatattcgtataaatctttaataatagtagatctacatgtttctttctttcatacttcattagaagactggactccaataaaattgaatattttgtttgttttttctccttgcatataaatctcatcgtatacaaataaaaatacaaaaatagaaacaaaaaatcactcaaaattatgccctacgaaggcaaacattgtttccattttaatgtattttgttccagtgtttttaatttgtatcttggtataaatatgaatagtataaatataaatagtataaacatgatagtataaaagtaaatagtataaatatgataggtttttctttaaaatatcagtgaagttgttgagataacctgaaagctgattatttattttggagggctctagaattaaattctggtagattctgaaatcaagattattaaacgaaagatatataaagcaaaatataaaaaggtttctttatatatggagcattaaagactttcaaattgctccataacaaaaatcttttaaaaaaattaagagcgtacttagcctcaaatattttaatgtttaccatgtcagcattacaacttgttaaataataayagtcgcttttgttttaaacaattctaaaaatacaggtaacatgcattgctgtgagactatgaacatctgtggtgaccacggattggctgacatagaggtgttcaacacttttgctgtagttttatggttctacaaatttctccccgttaaagatgggatagtgtctttgctccagcattggtagatttccccactaatcattggcggtctgaagagtaagagagaaactcaataagggtattggagaaagtaaaaagtgagttagctttccttgccaataaggagttccaggaaatatgttcttaatggagagaaaaaaactcagaaaaataaagcaaggaacaaggaatgmcctaataataatggtttttcaggtggyaaatatttcataaaccaatggtgaccagatgtttcctaccctcataaaacagagctaccgggcttcatgtacaagccgagggatgtcckgcattgaaccaggrcttagtgatagttccctgtgtgccaggcactgcgctggcctcagtgggggcyggacagacatggtctctgctgccacggaccttggactcagggaaagatgtggtaaatgaacagtttttaaaatcgccgttgtcacaaatatcagaagtttccttccagaatgtagaattccctgattcagcaaataaaaataacatgatgcccctaccctacccagaagccctctccattgaatggtagtaggagggagaggagaaagaacattccrgtaagaggaaaaatgcatattccaaggcactcaggtagggaagcagcttggtgcttatcagaatctaagttagacataaggaaaaacagtccaaaaaaacaaagcaaggccaacaacaacaacaacaacaacaaaaatgggtaaacatatctgcatgtctaatgatacatttttgaagtacagattaagaatcattatacacaaacgttcagtctaattcaccccagccttctttttctgacagcaataccacaggttcctttgtaggcagacagagttatctttctttagtgccaacccaagcacaggaatattctctccagtaacttaatttttctgaatccactgattgcaaatatgtcacttactagtttaaacattttacgttaaaaaattttcaaytgtagcacttgcattaatgactcttataaatgaattaccttatcttggacttagactctgtttgctttaacttyacccatctctaccttttgcagacttttaccagagccattacaacattataaggctttttttccccagacttgccctcctcacagtcgttttgagtcccttcatggctgtggttccttctcttacatatggggacagtaaagaataggttttcaattagatgggtttcaaatccaaactcctcacttactggctaagtaagcttgggtgacttacctaatatctctgagactcagttttcacatctttaaaatgggccaatgacactagagatttatctyatagggttgttgggttataggtttgtagggttataggttgttggatgttgcccagcatatgaagtattagcacaatgcttaacacatattgtctgggcgtggtggcacccgcctgtactcccagcagtttgggaggccaaggcaagcagattacctgaggtcaggagttcgagatcagcctgtccaatatggtgaaaccctgtctctattaaaaattaaaaaattagccggtcatggtggcacgcgcctgtagtctcagctactcaggaggctgaggcaggacaatcgcatgagcccgggaggcagaggttgcagtgagctgagatcatgccactgcactccagcctggccgacagagtgagactctgtctcaaaaacaaaacaaaacaaaacaaaaacaaacaagaaaaccccccaaaaaacccacatattaaatacataggaatatataacaattttaaaatttcacttcagatttccacagctttcttcctgtatagggggttatggctttgtactgggtaggataatatttgccattgtgtttccaaacaggaaaagttagctaatgaactgggttgatgttgctggcaggttagtgtttagagcctgtgttgccagtaagtggtataagaaagctcatggattccagggattcattttcctgcagcactggacttccttaaaaatatcacttcatacttccccacatttaaatatacctgcttgtttctcaccaactcaaaaaaccaaatgaatccaacttcccaggttcctgccctcccctcaccccacgttggctttgggtcccttcatgagtgtgattccttcctctctcacattgggggcagtaaaggataggctcttatttagattgatgtcaaatacaaactcctcacttactggctgagtcaacttgggtracttaaactaacatctctgagactcagttttcacatctttaaattgggccaatgacactagagatttaccttatagggtaaatctcaaagattttacctaatgtatttaatgtatacatctcaaaggtttacccttgtggagtagtacctcaaaaccaaagactcacgggagcttcctctatcttccttcccaatttgacttggtatgtcatgacttggaaaaacttggtgtcatctgaaaattggaaatgtcatcgtgaattttctcttccaaatcacactataatatcagagtcagatgtttccagcactgatcataagccaacacgagtgtttaattttacttcatttagtggagagttgtccttggtttgctacctccaagccagttcactagccatggacaagctgctctaaatacatgattcacattgcctgttttgttttttttttaatttaaaaaaacaagttataaaatgttaaaaaaaaatgaaacatcatttttattctaaactattgtcaagggcctttgaaagtcttaatatatgtacccccaggtttgtttttatccacattgatatctcctttacaaagagtaggtaacaaattagtcctcatggttactatattttgaaattttgttttatttcctttaataactaatgcaccaagcactcaggaattctaccatttacacaataaaagaattgtgactcccaagtttgtggttatgaagtatactcctggaatccttatgtataaaatcctgataaactgtcattgccagttcttaagcaagttataaaatgtggctagcagcttccttattttgccctagagtttcctcagattgctgaaataataggcaaaagacctgagcaaacaattcacgaaagagaaaataaaaacatttgaaaatataattcatattcaaaaatgcacataaaaatagatttattttttattcatcaaattaagagaaattgaaaaaaacagactacccaattcaggcaagaatacaatgattttggctttctgtgatttgtaataagtctttcaggggtataaaaattataatgtaacaagggtatacactacagtgcatagataactctaaactttgtcactggatttataaaatgtgaaaattcttgaagcaactgcaaactttgtagaagctacgtaagtgttggcaaattctccattaattcaaattatgcaaattagcactagtaacaagagagttagaaactgtttttycaaaaataatgacaagtagtaaaacattacagttcaatgaaagaacatggattgggggcagagtatcaaactgaaaagcaaaactaaattagtaattgagggattcataacatatgtctctaaagagacaaaacgaaatactgaccccctataagtgagactaatttgcttgtatagcaaaaatttgatcttgagtgcccagcttgattagcaaagttcccaaagrgggcgcccccatagtgagtgaggaatgtaactacagaagtttaggtgggcactgggcacggggagactctcccagtggctctttagaagctcataaatatctctagcttgaagtccagattagttatagaggcttactgtgttttgtcattttgccaaaaatgccccttttgcttcggttccacatttggctttccctgtgagtcttgcagggttttattctattttatcccagaggaacagagaactagaataactcaaatacttgtaggcctgggggagctccatgacttgaatatggtaattctctgctttggatggtatgattgaagcacttaccatttttctttgttttmgttttctgttttgataaaaaaaaaatgtagttttgcactgactcagacaaagtaaagtcatcccttttaacttaggattagccctgaggaactcttctctcctttttattaagtgtgctttagttccaatccctccacaatcccaggcccacagttatcctaagtatttgctgatacaggggaaatggcactgagcattgagagagatgaacctggcattaatttcctaatgtgttgtattcactatggctaatggagaaattactcagatttattttctatttgtaaaatgattactcaaagatgttgggaggaataaatgagacaacatggatgaaagtgtaaataatataattctacataaatgaattattgtcagaaccatcataaacttcttcattttggggatagaatttcattgccttttgctaaatgctactatagaaaataaggtattaaaaaacctcttggttttctgagggttaaagatttgtttcttcaattctaactctcatttttttttttgtggttcttgttccttgaactattgcccatgaatgtctaatggctggttaacttttctaaaattaaatagccctttgatggatatctttgtttctcatctctcaccagaatattaaaataaattataggctctagcttccctctaaataggatactttaaaaaagataattgggtgaagtattaataagagggagggaatgtactgggttaaaaatgtcaagatccttcagtactagatgtttgaaaaatccgtagaaataaaggatggaaaaaataaattaattgagtagttgattttaatgctatcttgtttacttgacattatatcaaatgagtgagcatttaaatatataaactgttaagaccgtgtcttgaggctgtacaaacacatatacagagacatctgactttaaaaaattgttttgaacacccaccgagatgaacatctgttttgcattcactgcccttatgcttttggtttagacgctgcaatactaatttttttttttttgagaagtgtgacattgcaatcaattgacaattttaattatttcaatgatatctttgtaaaaaaagaaaattcatcactcaaaaagcagaccacatggaaatttaaatatttatagagagtaagtgatttaaattgtcagatggtggcttaaatcatcagatggtgtttttctgagataattatattttcctcaagatttaatagcaactttcttttttaatttttttttctttctttcttttttagagatagggtcttgctctgtcacccaggctggattgcagtggcacagtcatggctcactataatctcactacaacaacctcctgggcccaagcaaacctcctgccttggcctcccaaaatattgtgattacaagtatgagccactgtacccagtctgcaactttcatattatttaccacgctcctcaaatttgtatttaaatmgttaatttcaagaataaaatcatttacggtaataattttaaagcaacctttcaaaggaaacatgtaagatagttttaaaaataagacttgtatatccttattatcctttattatatcataggatgctcttccccagagctttgaacttcaactctccttactttgtctctcctacaatggttctcacctaggacttgcattagatttccctgataatgcccaggccccacaccagaccatttcgccagactctctcatctctcatatcagtattttattagcctcttctgagattcagccttggggaatctctttagatttaactagtcattgggaagaactttgtcttcaaaatcatctcaaatcattgcttcttttctttgtgtacaccagaaaacaaagaagtgtaaagataatttaggagtaatatgatctgctgagagtattagwgtttccctgttttttttttttcctgagttagaaggaaatgatctcttttccttttttcatctgaaaaaaagtaaggaagagcctcttccatttttaagtcagagcaataaaatttaacagtaaatattacctcattggtgactgaactctccccttcaatcttttagaatttcttattaatggctttagataagatccttttgtctcattaatttttttatgttgaacactttgggtctgacgtgtagttggtgttcaagaagcacatgctggataattaattgtgctgagcctgaaggagacttttttgtttgtttgttkgtttgtttgtttgctctttgttgcccaggctggaatgcagtggcacattctcggctcactgccacctccgcctcccaggtttttttttttttttttttttgagacggagtcttgctctgtcgcccaggctggagtgcagtggcacgatcacggctcactgcaagctccgcctcccgggttccagtaattttcctgcctcagcctcctgggtagctgggactacaggcgcacgccaccacgcccagctaatttttgtatttttaatagagatggggtttcaccatgttggccaggatggtctctatctcgacctcgtgatctgcccgcctcggcctcccaaagtcctgggattgcaggcatgagccactgtgcctggccacgcctcccaggtttaagcaattcttgcgcctcaacctcctgagtagctcagwctacaggcacctgccaccacacctggctttttttttttttttttttttgtattttattagagataatgtttcaccaggttggccagggtggtctcaaaactcctgagctcaggcaatctgcctgccttggcctcccaaagtgctaggattacagacatgagccaccatgcctggcctggaaggagatcttcacagttaccccagagggctccacgttcattgtggtgttattggcggtgttatgctggccacacacacacacaacacacacactcccacacactccccacttggttttcctaataaccwgaggcaagtttgccagaaattggcttttctactttacaaacagggaaacttagtttctgaaaggttaaatcactggccgggtgcttgccacacacccagttagtaggcgtgtggggcgacggtccagggcttgagatttgtattctttctctttgtccacggctccttataaccccttgtcaggtaaaggcagatggatcaaatctgcagctgagacaaggggtaacagaatcagaactctaaaatgtatgaacaggttggaatgctggccacaaaaacccaaaaggtaaaatttaatagggaaaaatataaggtgttaagttcagattactttaaaaaaattatgaaatacagctttggggaacagggagagaagacagttgttcatgtgaataaaaaaatctgtggctatgagatcagcatgtgatggattgaaatacataatgtaaacctaggctgctttatagtatccatagaagtataatcaggttcaggaaataagagaggtcccaacttcttctctgtgctggaaataaatcatttggaatttgcgcttagttttagccctcacattttaagtgggacagtgacaaaccgatgtttgattatagtacacgtatcagcgggtatcctcaaaaactgggttatactggaccaacttttttcatttcggcacctatggaaagtttaaagacctgcaggatgtctatgaattttcaggggcttaaattctcatggtaactcctggctctaagatccatcttcaagttcaaatcccagcatcttgcctgggctatacctgttctttgctttgtggaccccaatagctcagcttcttgttctgattttcacagaatttcactcacacaaagattttctgtgctaagagattttactggtaatttgggggaggcaaggaaagcttaaggagctggaatgataaacattttaatttgaaaagcaggcatctctgttcttaaactttcttttggtgggtggggggtggggggcgttggaattttttactggcttccgatatgttctgagcactctgatcttgctgactgctctcactctcattattgttctttattctcttcctctcatatttcctgcaggaactccatatgtttctcagatgaatacacacagtaattcgtctttctctgttccttactctcaaactcagctccaggccaacctgtgcatatacagaagctatcaagctgcttggttaaatgaaagagctacccctaaatttctttcctaacagaatccattcttttagaatggaattgtgcatttaaatagcattttattcctctgttaagccaggaaaataaagggtttgaaaatgggagcttcctagcacttattttaagtaatttaaaatcatgaactcacttaaaattgctgcataagggatcattccacctttcccatcataattgtacatgatagaactgttcctctttctgactgtaggaagtggatattatatattgataaactgacattatgtaattacaaaactcagttgttttgtcattgtaaataaatactggtattcctaatgatattgtgtttgaaataggaaagagcagtgcaatagtcacacaactggaatggatctaggacagatgtgggaaaaggaggatagacagaaggctcagattaaaagagtgaataggtaaaaaatcaaacaaggtatgtaatttgctatagattagctgtaggaagcaatagagaaaaagaaactgagttcttttttttttttgagacagagtttctctcttgttgcccaggctggagtgcagtggtgcaatctcggctcactgcaacctccgcctcctgggttcaagtgattctcctgcctcagcctcccaagtagctgggattacaggcacctgccacctcgcccrgctaatttttttatacttttagtagagacgaggtttcaccatgttggccaggctggtcttgaactcctgacctcaggtaatccgcctgcctcrccctcccaaagtgctgggattacaggtgtgagccaccacacccggccaatcttgagttctattaaaagagagtaaaggaaatagtcatttacactaaggactcaggctttagagagatactaagtaaggaatttgagttttggaaaccagagaggatgaaaataaaaagctcatgaggaaatgatttcagtctgagctcckggattatttctgccaccactttgatttcctctcacaggctgagagagttaatctaatattccaaggattgaagttgctggatctgagaaatcagacctgcatctgtcctgacaatgctagcctctacccaagtgagtgacggtcatatataggcacgtgtatggtgtttgtgtcccaagagacccacaaaatctgaagtagcttttacgttgtttccctggggatgacttggacaaccctccagaaacaagkttagctgggagaaacattgtcctggtgtaaaaatggtccctttctgttagggtgggctagctcatgagattacttgcaaaatcagttaacttttttagtgaacagccttggaattttctgaataaactaggaaataagaagtgtaaaattttctacaaatgctgataatagaaataagtgtaaaacgaaattatcctttttgattttgcaattcacttaagtattttagtaattcaagatgatttttaaaagtcatataatcttatctgtattttaaattaggataaaaaattctaagtaaatggttggcttaatttatttataataacaagctcactctcccatctttaaatgcctagtagatcctgggaagttttccattaatggatacacctataaataggtaattaacacacacattaacctcaagaattaccaggaccatgagctatgctgcaatattatactactcaaggcaagacagcatttacttattttgatatccacagggcctatgccaggcatataataggtactgaaaatatttgttgaaatggacaaataagtcaagttcttatcttgctaacactgcaggatatgcagaaatgtgcacttagaactaaatttcaaatcatctaataatcagtatatatcagtgagagaaagtataaacagaacatgtagtttctaattttaaaagttggaacacattcacacagataaatacatgatttatcaatgacatttggcatagcagattatgtgatatttgccttgtagaattaagtcaagaaatttgttttcagtattcaggcagtaaaaatggagaaagaatatatataaaacaattattggcaaatattctctatatatgcatatacgtgagtacatcttcatgtatacacaaatacaccaaattcattcattattcaacacatttttaatgagtgagcaaaactagaaggatctcttcctttgggttttttttccccaaagatactaatgtctctgctgagaactaaaattttgtaagactttagcaatgaaatgcagtctgcagatttagtatttgttaagacttttcgaaaggctggagggagccaatagtgtctataaggtggggtatcttttcccagcttggctggttgtgggaaggtacccttcaaatgatgactcagactcttgggacagggtataatatacagtatttaatataattaaatatgtagctcattttcaaacatttagctcattttcatytacttcatttaatttttttttttgccctcctgccatttgcattcaatcatctacaccattatggaggtagaaatgtctctctcttacaactgtggcggaggcagaatagaggaaaacttacagagattgtgttttatacattaaactagatgcccatttagtascacatcttgcctagtaagcccagttaaacttaactgtagtccctgcagttgagacgagattatgtggagagggaagatgccaaaaaaaaaaaaaagataaatataatttatatactatcaactaggtgtcatgtgttatcctaattactttctatctgttaactcatatattcctctcaacagtagtatcgtctccattttacaaatgaagaagatgagggtcagacaaggcaagtgacgttctcagtgtcacacagcttgcaaatgatggagctaggaagtggtcctagctgacatgctcagaggctgtgctcttaattactgtgctatactttctcataaagtagacgagacagtatcagctcatgaggatttaaggtccatctcagtaggagagtggcacaaaatcttaatatatcaaaagacagcaggtrattaggtcatacggaaatggaagaggcagaggtctgaggagccaggtgaatccagtgggctggtggagactgtctggaaatggcccttgctctgggtccagccacgtagagggcaatgacgcaacaaggccatcagataggcccaaacctttttaaggatgtgaaagattcccacccaaggttggtatctgcctaagctctctctctctctttctctccatatatatatatatatatatggaaaggttagctgggagaaacatgtaaaccatatatatatatatagagagagagagctttacataaatatatagggagccttacatatagctttacataagtagtcatggtataatttttctgtttatggaaactgctggattgtggttgtggttgatataaagtgccaagttaggtaaaagactagtttcctaggtgggagcactcaacaaagtacttcagaattctttgccactaaaaacctgccacaataattgttaatagggtgcagcagtttttttttwaatttattttaaaaaattttcttttttctctctgttgcccaggctagagtgcagtggtatgatcatagctcactgcagcctcgaactcctagggtcaagtcaccctcccatctcagcctcccgagtagctgggaccacaggcacaacccaccatgtctagccatgagtggcggttttagttaccataaaaccacagatcccagagacaaactgctcaggctagagtcttggacatgtcattcactacctgggtgactgacacattacttatccttgctgtgcctcagttttctcacttgcaaaaygtggataacagcagtataaccttaaaggtgtgtgtatgtgtgtgtttgtgatgatgagaccagtttgggaaacatacacatacgaatttgagcacatagtgataacgcaaatgttagggtagatccaccaccactttcccctcacctctgcaactcaaatgtcagcttcaaaaggcaggcatttttgtctcttttgttcactcctgtattctgggcatcctgaacagtgtcttcactgagtaggtgctcaataaatatctgttgactggaagggacacttttcaacatttttatttttttgcaacatataattgggcaatcaaatggcttatatttctttaaagactggatctattataaaatgagtaagagaggctgggcatggtgactcatgcttgtaattccagcactttgggaggctaaggtgggcggatcactggaggtcaggagtttgcgactagcctggccaacatggtgaaaccctgtctctactaaaaatacaaaaaaattagccaggtgtggtggcgagcgcctgtaatcccagctactcaggaggctgaggcaggagaatcgcttgaacctgggcctcrtgccactgcactccagcctgggcgacagagtaagactgtctcaacagataaataaataaataaataaataaataaaatgagtgagagtgtaaaataaatacaacccaattcccagttagttttagtttacaataaaatatgtcacaactaacaagacagtctaagagaggacgtttttataggatgggggctgaattttgttgttggatgtgctgtcatctgaacacttctcatatgagaaaaaagcaaaaataaagaaaccaagtaaaaacccgaataacacaaacrgataaagaatgagtgcagttacctccctgaatatttatccccatcttgagccctgaataattcattgacgcttaagtaacagtgagtcaacatatctgcgtaaatatgacaatgtgtttgtgccacattttccattgttttcttttaagtataaatttcatagaactgaagtgtacttattagcagggaggctgcaatcatctttgcccacagggaatttggagactaactaccgtctccatgataggtcaacaatttagagtatatctataacccttccacaaaaatgcaatgagagatgaaggctggggtgaggtgagaaggaatgccaaatacaaactccaactccttacagctaatttaataattttgcagtgaaaaatggctttttatcatctcaggagcaagtgctttttttttyttttcttcccacctgctaaaaactcttttcattaaaaagggggcttggagtgcctttgctttgatgtaggagaatgtgtaatacctgcaatatttcttggctagagaaaaattgttttcattttccaatgctaatgactcattaaaaagcaaagtaagaagataaaaataaagaagaatgtaaaaacaaacatacatgcatactttttgctctttttttaaaaaaatgcgcaaactgaaactcatttaaaataattttttttccaggctcttgtctaactgaaatagaattatcaccattcgacatggcccttcaatcctaaaacccgtttcagagtaaaaacataattagcrtgaaccctaaggacagaaagagggtgaggtggtttctgtagttttgtgtttcggaaacagaaagaagcctagagaaagacacaatgactgtaacaggcacaaatcaaatgaatcacccactcgcatgctgggaaagcctttctgatcttttaagcttgcctgtaatttatttttggagcctctgcctgtgaatgtgaaacgttgagatggaatctgatagtagtcgcctmtgacgactatggaagtcactgtggaaagccttcatggaaaccagctagagcatctgctaatgagaaaatcgttagggctcatgtcgcagcacagactgggatgacttggtcataatacggtgccataattaacattctttttcagcttcaggtgcctttaaggtcttggactacactatagttggtttacatcataaaaaagtatgacatggacataaagatggcaacagtagacattggggattactagaagggggagggagggagaagggaagggggtgagaaactaactcttgggtactatgctcaatacctgggtgaccagatcaatcgtaccccaagcctcagcaccacgcaatatacccatgtaacaaacctgcacgtgtaccccctgaatctaaaagttgaaattatttaaaaaaataaaataaagtataataaatctgaattatatgcagctgtgttttagtttggaagaatcaacagggtaccaacggggatgaaaaagataattttgagctttgatgagactgtgtgttgcattttcataaattaactatgaaaagaaattgtgagaggcctttgcacaacctttaggttttccaaagcatctttatttatttatttatttattkatttatttttattttttgagacagtcagtggcgccatctcggctcactgcaacctccgcctcccgggttcaagcgattctcctgcctcagcctcctgagtagctgggattacaggggtgcgccaccacgggtggctaatttttgtatttttagtagaaatggggtttctccatgttagccaggctggtctcgaactcttgaccttgttattcccctgcctcggcgtcccaaagtgctgggattacaggcgtgagccaccgcgcccgggcaggactcgtaatttttaaagctgaaaccccttgacgtggggtctgaaaacttagatctgaactcaacttgtatcatttcctagctgacaaattatggaaaagttacttaatttctctaagcctcagttttccttatttgtaaaatgggatagcacagctgtagtaaggatgaaacaaaataaggtgtgccattgaaattcatccctcaggtagtaggtactcacaatgttcttaacaatttcaaattataattctatgagctagttttatgacacactatacatttatctaaatctgtgaaatgcctgtttttcacgcccataagatcagcctttttaggggctgggggagggctaaattctgaaccacatgaacacgaagtcgtagcatccaaaacttggaacatatgtgtttcggaaacagagagagaatcctagagaaagacacaatgactgtaacagacaccaatcgcgggtaatcacccacttgcacaatgggaaagcctttctgatcttttaagcttgcctgtaatttatttttggagsctttgccggtgaatgtgaaacgttgagatggaacctgggactttagagttgggagacgttttttctcctaaggtctggaattattccaaaagcattcccaatgtaatttaaaattcaataagaaaccaagatttattttatgttcagctttgtacrattgtgtctcttctggaatgamctgtcacagaatgagcgcaggtataataactgaatcataaggtcatttgaaaaacaaggtctatggctaaaatggactgaattttattattttatttaaaatttatttaaaataaaattttattttattttattttatttaaatttaaaacaaattgttctgaacttggaatgtcatgactgtaggaattatattaagcaatttctcattcggttaaatctttcaattttctttgtatacttaccttttcattttaagggcaaagsctttaaaacattttattagattccagatagaaaaaaggaagtggattgtttacttactcagaataattcmctggatctatacttcaaatcatgaggcacattttataattctatacattttcaattatcattcccgttttgcttctacttatttttaaaatcctacttaataccctacttgcttaagcaaatacttcagtatatacttatgatgcctatgtataagcacaattcaaataaaaacacagcttgttttggtattgccactcttgtgtgttaaaacagggaaaagatccaagaatataaaatatgtcacagaaagtttccttactggttattctcacctgaaggsggatagaattcaatttattactgctgtaacaggttaaacatgaatgtggccataggcacmaaatatgttgaactggttttaaagaaaataaactttcccttttcctgaacctttcatccattttgaagctttgaactacttagataaaaatttccctctcatttttgtctgcctttgtagtctgactttgagccaggacttgaagcagacactatggctcatgcagaaaagaaacttcttcccacaagactgccagcgaaattttgcagactcaagatgttcggagagtttggacaatcatcacagtttttggacgcctatctgaggtaaacataaagccaaaccttgacagtctcattagtagtgtaagtatgattcaatatgaggaatttctgctcttggctggttgatataagataattataagatttcttaattgaaatttaattggagatacaaagtgatacatggcactttgtaaagcatcacagctaaacaatttgctccagtataccagatgagcagaaaacaaatcaatacattcttagaactgctaagtgaaaattatgtagaataattgcttcaatcattgaaaatacaattttttagcagtatgtttgtgtaaccaaaagtatgttattagttattgagtgagtaaagcatttgtcatcacagtttgcacttgaaagggttacaggtaagagctgttttttgtgcccaattatttcctcagtcctgtgttctcaccctaagcaacttaatgaaattggaaaggcatatccttttagaaatgtatctgtaktaaagataatytgaaagcactaaactctagaaaatcttttccgctgggcgcggtggctcaygcctgtaatcccagcattttgggaggccgaggcagcggatcayaaggtcaggagatcagaccatcctggctaacacgatgaaactgtctctactaaaaatacaaaaaaattagccgggcgtggtggcaggcgcctatagtcccagctactcgggaggctgaggcaggagaatagcttgaaccccggaggtggagcttgcagtgagccgagatcgcgccactgcactccagcctgggagacagagtgagactccgtctcaaaaaaaaaaaaaagagagaaccttttcaatgctgatgtagttaggctttgtgtctccacctaaatctcaccttgaattgtaatcccataatccccaagtgtcaagggagagaccaggtggaggtaattgaatcatggaggtcgtttcccccatgctggtctcgtgatagtgagtgagttctcrcgagatctgatggttttataaggggctcttcctcgctttgcttgacatttcttcctgccttgtgctgcrttgtgtggaaggtgtcttgctttccctttgccttccgccataattgtaagtttyctgagacctctccagccatgaactgtgagtcagttaaacctctttcctttataaattacctaatctcaggcagttctttatagcagtgtgaacacggtcaaatacaaatgctagaatgtttcaaaaggtaatcccaggatggtaataatgcaggagggcaatgctctgtggcttaatgccttaggtgcccagagacctttatcctaaacagagggaaaaccttgttacagggtttgttgcaaactgagaagaaagccttctgtagcatgtcatttcctttcgttttgttttgctggaagggcaacaggaatctatttgggttaaaggacaggcagaagtggaacatcagaagtcaggggtcttttgggagagtcctgagtagcaggagtcatagatctggaataattagattattaaaatgaacacttgaacaaaggggaacaraaagctgttaaccttaagaaaagattccagacaattctgtttgactctcttttttatcaaaacaaataaaggagtataagttaaaatgtattcagtgaagtctctaacyggcaccaaggtactgagagttctttaagtsttcttgtaaattacacaccacgttgcttatgtgattattaatgcgatgatgtaatagttgtatttttatgtacaaagaatacgagcctggattgtgtgctaaattcctgcttttgctcacttaccccttatagacagcataaaggaggactcttggtcagatatttgtagaggtggctatagttccctttatttgcctaaacttgctgagtttcttaagagggakgcaatgggtgttcaaatggaacaattctcaccgtggtggcttcagtattgcaaggtgttaaacaccccatcctactaaatgccacaatcactttycatccattgtgatacccaccatgtgataactctgcacatttccaatctcttcttggaaagtggtatacgcatacacccctgaagtcttcccctagccccagccaccaccatataagaaccactggcctaggatatgtgggttcggttatctgaatctcaattacagaaaatcaacagcacttctggtagtagaaggtaacccagttaagaattaaraagtatagactgtagtttgaatactgaatcttttggaaaatcattgaattatttgaacctcagtttactcatctattaagtggtaatccaccctctctcccatttaagccacttaattcttgtgaaaatcaagagatcttatgtaccttaaaatactttaaaaaatataaaaacctacataaggaaataatatagtcattcctcagtatctrtgggggagtggttccaggacctcccttggataccaaaattcagagatgctcaagttcctratataaaatgatgtagtatttgcataaaacctatgcacatcctccagtataccttaaatcacttctagattactcataatacctaatatgatgactgctatgtaaatagttgttatactgtattattaaggaataatgacaagaaaaaaggtctgtaaatgttcagtacagacaccattttttttcaaatattttcaatctgagattggttgaatccacagatgcagatatggaggttgtattagrttgtattaggaataatcctcagtagtcattatctttgggtaatgmgataaaagacagccaattagtatgagataacctattatgtaaactgttctagtagctatagaggattcaaaggaaaataagacagaattggtgcccctgtggctgtcatgacaaagatacaatgtatgtggttgaaaagatgtcagtatgaaggtaataaatgattagaagcagacatgtgctattacaatatgtactggagaagttcagaagagaaaatgtgttcagtggaagatacaaaaagccaaaaatgatgaaggaaccacttcccctattataccatttgaaatgaatagttctttttcatcataatgcatattagaaaagtatcaatcttctccatatgcatattttataggtcatagatcttgagaatataaatgattaacactttcttctgtgggaaatattatcagataacaattcatttccctaataagacagacaaatgattgaaaggcaagaaggtattagtttcatagtgccactgctgatatgtcctctgactgactctcagatgaacacgttcgctgatggtgtttttgtcttccctgtctggtctctggctctggtcttgctcctggtggctttggtctcacctctgtgtcctgacttcagcccatcttttccttgaacttggtattcctggttcaggaattgacctcagcttggaattctggaaactcatccctaaggggtggactccttgactccatgttttctccagaaatctagataaagtgcaaccttgtaaggggtcttctacctttgccttgcttaagatgttaaaagccccttggtaatgaagagatgcctgtatgagaacaacctgatgaaccataatatattatacaagattatttggccattctaatatttattaacctgaaattcctgaagaagaaatgacattgtcagttatcaaaaacttgcatttcaactcttccttcttgtcttcgtcaatgtggcaaatccttctcctttttggagaaaatgtcctcctttagctgtgacattgatctctctagatcctcctttccgtatgaacactccttctcccgcagcactggcttctcttccctcagtttcccctggtgcaggctctccacatggatctgtcatgagtccttttctttcttgtctgctcaccccatggcccagctatctctccagtcaacatctctcccaagctccagcccccatttcagaccacaggccagaccctttatatgaatgctcttcctatacctcagactcaagtccgtaacgtaaacatcgtatggacttctccgtaacatccaacagaaatctattcctcctttggtctttctcatctgaatggcataattatctagtcatctagtcattcagacttgtaggaatcacctttattgtttctttctcctttattmttaatttcaataactcaccaaatcatgaaaaatatcttcaaaacattccttgattcaggcccctaatttctattactgtaggttcttcccctctcagtttctcgtcagtgactgttataataacattctaattaggtaacagcgtctagtctctttgcctactaattaattctgtccatggatagaattaattagaagggaaagatatttttaaaakaatttagttataaaagtaataaaagatgatcttaaaaattaaaacaacagcaaggtagaaagtaaaaagccagtcttctccctcaactcccaaaggtttgatgtatatttttccagatgtctttctaaaacatatacacacaaatatgctttccattattgtcctcgagggttttagtgcttctggtgaaatatcaggtgttagtctgattcttcattttgggtaacctattttaattctttagaagcttttagaattgtctcttcatcttgagattgcatcaagagctttattattttttaaacatctatcctgcccaatgcttgattgatgtgtctttcaatcartcagaaggttcctgtatttcttcagcaaaagctaattttcttctaatrtttctttcaatggtttccctttctttcattatctgtgatttcttcttatggaattctactgaatgcaccttggcctccatgaatctccctcaagtctctatccttttcccctatttatgatgtcttttcctgtgtgatctacattttaagaaatgtcattttttcttctacaagatagttagctttatcctctgatttttcagacaatcctctgaaatttttacttacrtaattctattctaattttattatatcctactttttcccaaagcaatataatattatttttattgatggtgtattttgttaattgggatttaaaaatcttctctcctaaagttttttcttgagataactcagcttcttcttggattggtcctattcattcattttggtagagatagagaggccaagttcttgttttcctataatacctggctattctgatagttagattatgtttatgaatgaagacttaggatgactggtataagtaatgtgctatgtttcctctgaagtagtgaagatctkatttccctgtagagaataagagtagggcttttggagaacgagatcatatcccttgcagggatgtgcatggagctggaggctgttagcaaacttgcacaggagcagaaaaccaaataccgcaccttctcacttataagtggaagctaaatgataaaaacacatggacacatagcagggaacaacagatactggggcctgccagagggtgaaggatgggaggaagcagaggatcaggaaaaataactaatgggtactaggcttaatacctgggtgctgaaataatctgtacaacaaagccccaagacacaagtttacctgtgcaacaaatctgcccttgtacccatgaacttaaaagttaaaaaagaaataaaatgagagaagtaaaaatctttaaaaaaagaaaaaaaaggagggcttttggaagattccccttcccctgtaaaactccagcccctcaattgccaaagcaggaaaggatttacttcagggatagagtggttctctgtttaacatgccctctgtagggcagctgtttttgttgacctggtggccaataccttatgaagacagtgtttttacctacattatatcttcactgtagtagcatcaatgtgagggaggatttttctatcagcattcatgatttttcactgagtattccttaagcatgcatggcctaacttttttggttcaccatataagcttcacttcctgagtttcttaggccaattttcttccgtcatggggacagaagatacgtgaatggtatcactcagtgtccagtgtgagtcattcacacctgccgatttttcagctttgttctggtctggagtgccggacactgagtggtaatggaattggtattacatcactcctctggtttaggatgaattccatctttacctgggatatcctgtccaaaaatttgaaggcagcctttcrtctctgtaatttgttcaggcaaaataatcataaggttctgggtctaaccatccatttcagattgatcatcatcagcttaaaatttatagctagtctacttaagcaattctttgttactccaaagcagtcttattaccaarcattctgacaaatagtagaaaaaggggaaaaaatcaccacatggtcccacaattatatatattcacacatacataatcaagaaatcttactactataagcaatatcataacattattattttcyagtcctttttattcatgccttgaattaaggrtatttgacaaaagggagaatattttaaaaatatgctctgtaatttgcacaaacacttcttccagagactggattctctgttgggaatatctaggtatcagatggtgccaagacttcagaggagggggacattccctgtttattagagggaaaagaatctggagcttctgcaatccaggataaaagagaaagctgagaagaaagggcagtttggagagagaggtgagtagtggtcattgatggttataggagaatatgaatgtcttaaaatgatatttagctttccagatgacytgccttcttggctcccttacagattgtgggcatgcctgtgatgtaagttcctcatctgtctcctttcagaccatcttctgtgaagtttattcagctcataagtgtgaataaaaaattgctaaatgtgaactcaaagagacagtgcagttttacatctgagtscactgaatgcatcacagaagcagcatgtgcagcaacaggagtccaataggtgagaaaagatatggaagacatgctttgaactttcacaaaccataaaattggcgaggggaggagccaattatatcaatattgtgagaggcaggaacttcagttgcaggtgtctatctctctctgcagttctaggtttattgaagggatggatagagtctttgtacccttcaatacccaacagagctttacactcaaggagtgttctataaatgtccaacacatgcataacatagtccaaatgcacgtaatggacatcaatagcaagatgagagaataagggcagaggccttatctgcaaagaaatattttgtttaatgagaaggttgagattgttggctaaaatatcagacttccagatttgagatcttaactatcttcctttattaccaattgcagtrgataaattagagttagctattgttactccatttctatcaaagtacattcagtcactattctggagagtaaatcctcaaaaacttctaattctttacagtatgtaattgttctaacacagaacccgagggccatagtaataatgaaatataaaatattgttaaatgtgcaccatttagaatggtgggaaacctaatagagaaacataaaattagtttgacgtttacacatattgtacgggggctgggtttcattaaaatgaaaataaacatgtaagctaatattttaggtgaagaaggtatatgctttgctttagctgcaacaattacttctttaagtatttattttcatttatttagcctggttttawttttaaaaacaaaaatatcaatacttagtcattttgtctgtaattatttgatttaaaattataacagctttatttgattttgtaattgtcttctgtctgctgagaactcccactacagaagccatgtaattggatctttgttttcggtaataaaatgtctcaaaaaacttttttatattaaacgattgttcttaggttttaataaaacagatgtaagttaaacatagtgatttaccagattcatttctttggggggaaaactagctgaagactttccatcgtcatgtggtaatgcagttcagtaagagcctggggaggctgtgcccttcttaattgtgtaccactctcccccttcgcctggctccctgcacttgcgctaatactatgctgcaggttacatgactgagggagggagtcagattttgaagagmaaaacacattttttttttttttctcgagacagagtttggctctgttgctcaggctggagtgcagtggcacaatctcagctcactgcaacctccacctcctggtttcaagcaattctcttgccttagtctccagagtagctgggattacagggatgtgccmccatgcccaacgaaattttttgtatttttagtagagatgaagtttcactaggttggccatctcctggcctccrgtgatccaccagccccagcctcccaaagtgctggaattacaggtgtgagccaccgtgcccggcccaaagcataattcttaatggcacacctagttcttatgttaggtgcttcctcctttccactgatctggattcctttctaccttccttttggcgtgactcctaattcaaactgtaaccctgttgtatcacactcctcatccaaactccatgatattcggtattctttgttctcattagagtttactcattccaggataacagacgtgaaaaaaatgcctaagagttcccctgtggtagctagtcttcaaatagactagtaagtgagagaaaataataaattgttttgagccattaagttttggagtggtttgttatgtaccattaaataagtcaagcaccacttcaaatgtatgaatcactcatcattacaaattccaccaaaaagccaacttttggtgttaataatcccagacacattactgtcacgttatgtctttggatagtttgcctacctctctgagtctcagttttctcacatctaaaacacgtaataacagaacctaccctacagagcttgcgagataactggatgagagacagtatataaattcctttgtaaaaaatgccagacatatgtagcactccatttagtgttagtcatttaatttctcattgacagagagtgaacgaatgagaaaattycacttacaacatcaaatgtctttttggactttcacatcaatgtgattcttttactaagttatagaattggagttgaagtttacttaagtctaaaagcaaacagcgagaaataatagggaatatagagctggaaaagtaattttgaagctgtgtaacttgcctgtgagtaatccttagcaatttcagaggaaagcatttcaggaattgcttgtgtcaccgtatctggataataattatgggtcatcatcattttaggtttgggcaatcaggaggaggatgtagcagttgtggtcctagctagaaagagagggcacactaaaactcaaacaaygcaaggagggtttcatgaaaagattatatctgaaggtatcgtcagagtatgaggaaacccagggataagggatcacctggggactacaaagcagaattgctaccactcttaaccctaaaggaacagaaggtggatgcactttcctgaacacagggaagcattgtgttgatggagaccttcatttgacttagagggccaaggcaagcccataggaggaagatgggacactaagtaccttgagttcctctctttcttccttctgatctgccagggccctccaggacttagcccaaccggaaacctgaaggagtctgttctagtctacacagatcagccactcagggcaagacagtggggtggagaagagtgggaagaggaggatctgtcagggtctatgaaagatgatgagtcagaggataatggagcaaaagtagtaaggcagacttatgatcctcatatttaaatgcttgtattttaataatcttaacacaattctgtggcagcttaaacccaaggaatatttaagtttcttttctgatctatgaagaaaagctttgtgaagatgtacagaaccccaaagaggttactgtctttatttccttctgtatcctactcraagttttaaggaagtaatgccatgagcatgactttttttttttttttttttttttgagatggagtttcactcctgttgcccaggctggagtgcaatggcgcgatctcagctcaccacaatctctgcctcccgggttaaagcgattctcctgcctcagcctcccgagtagctgggattacaggcatgtgccaccacacctggctaattttgtatttttagtagagacagggtttctccgtgttggtcaggctggtcttgaactcccgacctcaggtgatctgccatcctcagcctcccaacgtgctgggagcacgactcttcaacaatgactcgtgtcacctcggaaggattgctgtcgygtatatgtttgttattgtgagtacacacaatttttcacagagagctgagacaaatgccacaagcagctggcaaaggaggagactgttgcatattaatttcattccctgggaggtctgatctggaaccatttgggatatggatgtttaatggtctctagcastgaactatcaccagctctgccttttctcattgcttcttggaactgtttctcatgccatctgcttctaatccttcaccttgtctctttcagattccctttctggaggcttcatttgcttctcttaatttttttttttacccctggcttcaagcttgtttcctgctctgatcaactaagatccacttactctatttggctgayaaaattatccatacaggtgaggctgtgagaaaacactccaggtgctaagagccttgggtaatttctaacacttgccccctatcatccattggctttragcacagatgattagtgcaggtgtagcattgtgtttgcatgatgaaaggaaaactaaattgtgtttctgtagacctacctgaggatacgaagacctcctggaagaaagtgaggcaagaggacaacagatagcactaaatatggggagtgaaaaaggactgatttgcaatgtggatgtgagagagagaagatgaacccaactcctctttctttttggatcataatttgcttcaataccacggatgtgagaaggtttaacatttcaaccagaacaaactgtaatgaaagacasgttttggctgggtttggtctttttctgatttgtcaaaatctgaaagatcaaaatctgaaagccagaaaactatccaaaggcaaagagaaaaaacacatatgcaacaatacagaacttgaagatgaccccatgaagggtcaagaaactgctgaaaccaaatagtacgttccgaattgcaggtagctaagagctggcctcatgttccaaaaaaacccatggttcttgaggcgtgtgttggaagctgaactctatgctggaaggcaggggctgctcctaggccatgttagaagatacaacttccaattccaaagagctaaagccattttacatagtgcactggatgaacaaatgttaagattttaagatttgcaggtgaaagggactagatcagtataaaattttaaaattggcaacataagtgttacagtatacattatatattatacggtatataattattataggttacacagtggtagtaaagttactttgatttgtaataggatagaaacaccttgttaatggattcatcattttacctgcattggcctattaggatttagaaaagaaaatacaatccaaacacaatagctctcatactagagtgattcttctcattcttcttctgtggaatatcttgtttaaactattactaagggtgatggtatctttaatttgaggtataccattggcattttccattaacaaatagtaaaacaaatggggcacttacaacatatgtgccaatcccctccaattaaaaatttctcccaaatatctagcatctaggttggaaatgaattggtcaagatatttgtagagctgagtgtgtacaatggggcagcacaaatgttcagtcagtgaaactgaccccaaactgaggcaygccattccttgtctgcacacctaacacctagatacactataccatgtggccccctgatgaattttactgtgggcagaggaatctctctccttttgatgtgctcattgactttttaggctatgacgacaatctctcrttccaaagttaatttgatttcttcaatcttcatgcttccctcttagctccctgttcaaagttaaaattatttatttcgtaaaaaatgatcttgcagaattgtattttgcaatggccttttgtagaaaaggtatatcagaagtcacttgaactaaagtgtggttggggccctttcttcctcgattttaggcagcagtgtgtgtcctcaggcttggcccatggaataattccatgttgcaggattctggccaacatatgccaacacattcttaattagaatgctggcagctaaacataaggattaaatggtactataacggattacaagtcatatctgttatattctgcttgggatcagtgttctgtttataaargaaagagaaacccagcaaaatggctttgatagaggaggcactgtagctcaggccctcacaagttgcaacaaggaaggttgttgctaagagtaaagaygctggctcttcctcatgtgacaccacaaagtgggctgggaatgtatacagcacagttttctcatgaggaccactaaagaatcaatcatggctcttttcttttttaaggtttcttaacattgtctgggggcaatggaaggaagcgattcatgaggtttgcttttagagaactgctcactatctgtrgtggtgtttctgatggtcaggaggactcacccaaactccattgagacagatcttgagaagggytatggcagtagagtatagcagttaaaatgtacagattcgttaatgctctaggggagrgatacttcattttctatgatgacgtgattattacacactgcatacttgtatcaaaaaaatctcatgtgccccatatatacatatgcctactatgtacccataaaaattagaaacaaaaaagtatagacccaggagccagtttgtctcagtgtgaattccatccctaccagtaactggacaattgggaagttttgctaaactattcatatcttagtatgttatttttaaaatggagaaaacaaatttstagttcactgamtctaacatgaaatcaccactagataccattgttttatgaaccactaataaagaaacagcatatagtactggccaagtaaataattaagctgccaaacaattctgaccaaatttgtatgtgtacaagcaatacaaccacaaaatgagtcatctgacagctgttgtttaagtatgtccttttctgtaaagagttctgattacaaagatgttaaagtgttgtaaaatagatgtcttagaatcccagaaatctggcagtatctagcttattggaataagtgaatttatacaggtagtgcccttagaagagtggcatacactaagtactcaagaaatgttggctattaatattattatatctattagtattactaggagaatgacaataactttcgtgagggttcagtgttaatagctctgtaagaaaataaagaggaatcattttaattggtgactttagaatgatgaccatagggttgacaagcatgaaaatggcaattttagcataaacttcctacaatttagtactatgtgtaattctacacagtgactgcacagacatatatgatggtggttgaatgttaccgtgcttctggtgttaactttcaagacctcctcattaggggataacaaggcccctggactggagtgaccaggcttagctaagccctgaccttgaacaaatcctcttatttatcaataccttctcattactatccttctagaaagcatgctgggcccatgctggtccattaacataatcaaattcatatattgatatggagaattcttggtctttgtagtggttcaaagtccaaaactgaaacattttctktctcatctccctagatgtccacaactgtatatctattgcattctctttgcactaacacaattagaatattctctgtcaaagcaattggtctgtaatgtctatataatggtgaaaattattttgaagatctttctgactttaaaagaaccattaatcttcagatgagagttttctttgtctgcctccctccttcctccctcccccctccttcctcccttcctccttccttaccctcccctcccctcccctcctctcctctcctctttcttctcgttctcaarkattctcctccattacttggaaattcatttccctagacttgttttcaatttcattagaaatactcaccattttcaacaaccaaggctaaaagctgtcatcttaggaaaaagttcttattccctagggtatttttatttacattttttggaccacaacatgtggatcatataaacagtgactggaagcttgtttctgtggcctaatttaccatgcactgttatatggaactagacttcaccattggaactcataaccgagagaacaaagctagttttcacttgcaattagtattatttttggccaggaaaagcttttgattggatttctctatcasagttcaggagaccagcagtttagtcctatttcagcagatatccaataggatgctatttcttggctcaaatcaattaaaattaaataggaaagaaccatttctattgttatatatcattcaaacaccaactggtagaactattttgcatcttggtcagcacagtaagctatataaagtttcatacttaaaattgtatttgctacagttacatttataaagtaactccaaaacgtcaaaagaatgcaatgtctaaatggagtccttgaattgctgtaattatgcttaagcagattcagtgatccatgaggaggtatggccccaaggcaaatgaagaaacatgttgaaaagtacttaaaatagactctgcagaaaagatttgagacattgagtagttttgactgtgaaggtatctgaaacttcagggtcaaattctttcaaaacaactatttgatactagtttgcatactaataaattaaacttccgaaaagcacatccttttccttttgagagctttgcagcatggtataatacttagtagtaagaaaatgcaaaataaaaggtcaatttatctagctgaggaaaagcctgcatttgttacttaaattattttagatttttcttcctgctgaaattattgaaatacaaaaacaaagagtggctaaagtattggggaaccactttcaattaactctagcaaatagttaacacatgctcacaaagcaaactgagggaaattgctaaacaatttttaaagcagcaagaaaacaatagtcaaagagattttatttttggaaggtgttctaaattgacagtaatccacagtacrgctgaccttcacagcttctacatttagaaagagaggatggggagataattagttgtatgaaggaggagtagagacagaaacaaatcacttttctttggctttgatcccataccctgcagcagtgaaggaacagaaggccaagtgaggtaaaaatktataaaaaaaatagtatgttatacagagaccaagggaaagtatcccactacttcctggcagcctttgtgatgattccgactctgagatacaaatctaggactcaacaaatagtcaaaagcaactttcaagatgtattgtatttctgataaatcatttgtttattttatgctgttgaagtgttccatctccataggctctataccattgtgaatacttagtagtataaaagaaaatggcagtatgaagatt

SEQ ID NO: 1590 - DNA, 12391 bp, Homo sapiens
accactaacttagtcaatgtgacagctgcaagtgggactcaaagttcagatgcctcaaagctgagagggctcataggttggaatccccattcttagaacaagaatataacccaatatcataatcaaccacctaattccatagactgtttatgaaacaaaaaatatttcctcttggtgtaagagcacccamcctctaaacttagaagaagacttctcccactgaatagyacttacccrcatgaactggtcatgttcatgaccagaacacatcagtcaatcagatcaaaggagagtatagcacagttagaaggaaggtgtcaagctgttagaccaagataggtttttcttcttaaacatgaattccaatcttgagatttgaggattatttagggagacaaaayatgatttacatttcagggagaagggaggatgatgaaggtcacatatgttaccaggacgtggccctagtaggcttctattttccgtcttgagttttaaattgcagtttgtaatttgtttcaaaacaaagaaagtagattttgtataatctgtttgtcttatcaagtttatggccactcccatttgccttcactctgggaatcttggatgaaggtggggaaggcatgsgcctaccctcaactttatgctaacactcctgcccataggaaatgcattaattctgtaagccatcacagaacaggacaagatcttatgacagttttatttgggagctcagaatttctaataacttcaataattatctccggtagtctccatgcacatgagttaattataacaagaaaataaaatacttatttcagcttctaaaaattctaagaatgtaaatctctaatgaagtgttgagataatacatagctgtttttacaaactttcaactaagaaaatttcattttaactcctgcctacctcatgaccacccagtcctctctttattattacttatgttaatattaatttaattattattaattttctaaccagggctcaacccagatggacaaacaaacatgaaatcagggactgccaaggacatttcttcaaggtccaaatagttacaaattgtagtgataatgaagttgaaaaacacatggatatggatgactttctcattttctcactatactggaaacacacacataaactatcaatgaaatctatacttcaaaaaatatattttcaaaccttagawacctcttctggtcctggtccatattgaattcctttctaaaatcagaaattaaagctttatcataatactctttttaaaactacgatgttcttaaatttttatgcttccaattggagaatggaacatacaaagtattggccgggcgcagtggctcacgcctataatcccagcactttgggaggccgaagggggcggatcacaagatcaggatattaagatcatcctggctaatatggtgaaacccgtctctactaaaaatacaaaaaattagctgagcatggtggtgggcatctgtggtcccagctactcgggaggctgaggcaggacaatcgcttgaacctaggaggcggagcttgcagtgaaccgagatggcgccactgcactccagcctgggcaacagagcgagactctgtctcaaaacaacaacaacaacaaaaaaaacgaaaatacaaagtatcatgaaatttaacaaaaaatggtcttatgtttccaaaaggataacactgattttattaaaatgtctacataatttaaatgactgcacatgtggaataaaatttaatataaaactcagtcacctgaataatgacaacttagaaacagtcacactggtcatagagagtatctgtcgacttgaakgagaaggaagcagccatgtctttataggaaactagttcctgttttactatagagatgacagggggttggggttttattttcattattttttttttttttacagattttaccttgatttagttgcataatgaatgcaacacctattttccacataagaagataaagactgatttgaaatttttcaaytctgtccatcactgttgtatccaactgacttattagcatacaccttgctgcaagggttttatttttactgagggattcttcgtgtgcctcctcattttcaccaaaatgtatataaatctcctgaattttcatgacactgatgtggctaaaaattttwaatattttcagttctttgaaaatacaagaaaaaccttcagaaataagaattagccatggttcagaggttctgatttgttttaacaaaaacatcaattatttcaagttctctgctgactagaaaatagtggatttcatttgatatggcaaagcaacttgttatgttttgtgctaccataaaatgcatcacaatttatagtaattacctgaatattcartttgtttctggtaccctcctctcagtcctacgtgtctgttagagaatcaaagggtactgcttgtctaagaaatatgctaaagagaggacaacacaatatctggagaaggaaataagaatcatcaaatgccctttccttctttgatataattcctaagattacagaaattgaagataacctagcacacatcacctccaaagagaacagaagaaggtcttttaacttaatcttgtagataaaatggattacaggagctgagtgcccagactgtgaggcagatcagtaacagtttcaacagctatattcaaayggtgttaactagtgcatcagcatcaacctagttctaaatctcagaatcatagaattcttttctgggttccatttgtttcaccatgttactcaatgtcctggaagaaaatagagcggacatcataaaatttgtagaagggagagtggccatgtggatgactgaatggggttggaagctgacaggttggagacaaggactatatcttaaattaataaaaataaattttaaagtacttatagaaatgaagtatccacaaatgaaaagtaataatagaaataaattgaaaagaaatagaagtaaatgtaaaatgatgtgattaagtccaaaaggacaattgttttgtacagaatggagatgtggcrtagtagcaatacaggcaactaagacttagagattttagtctacagaaaggttaatgtgaatcaacagtaaatggaatatttttgagtgaatgaataaatgtaatgtattataggaggggagaggagggaaggagaaaaagagtagggaagcggaggggaggaaaagacaggagaggagaggaaggagaggaaaaggagaagagaatctgtataaaaggaagcaaaagccccacttatctctatatagcctggacaacccatgaagtactgcaatacaagcatggagaaactgagcacattcaagcatgacctgagatgtacaaacaatcaaatcaataatatccaagaattcctcraagtacttgagcatatttaccckggagatctgatcagcatgctcaaatatcctaataacttcactgggaaaaagaattagaggtgttgtgtttgaccccagtggttacaagtaggacagatgtattagactctctaagggtaccttggtgtcaaagtcctctaaggacagaatggctcagcttgggagctactgatcactctctctcctgaagatgctgaaaccctgattggatgacccttggtaagacttttgcaaaaccaagtcaagtgttagataggtggcaggattagatgatctttgaaagtccctccaaaccttaagattccaatatgtaaacattttcctgtggtgcacattaaatccttacaaaagactttctctcataaagacaatgaaaacaaatggttagcctaagggaggtgaaccaatcttcagaaaaccctaagagactcccctattttcttgcttgtttgctcgttagagaactaatctcctataaaacaggaatttattaatatttctttgtcctctgctatactggccgactttgggaatttgcacacagcacactttatcttgctaaatataatagtctgtctggcattcttcctttgtgagaaatccttattcacttgcataaattatgtgtaaagatctgaagcatactttcctttcttcaatacagactattcccagaagtagcctgacacatgccaaacatctgctcccacatgcagctcaatacatgatattgatatgtattatcactgggtgaattctaaatacaaagccaatttagcacactcctgaacaattccctccttctctcccggccaagctgcagggagctcaaggaaatcagaataattctaatacttgcctaagcaagctataaccaggtaaatctgctaaaacaaaaaccacagtataacatttcaaaatctaataaaaattagatacacatgataaatataaatgttcatctaatttaatacatagctaaatacatagaagtattttttagtatctgctatacttacagtattgaaagacgttgctttcctcaactgtgaattcctgggtgtcttgagtgtttgttaagcatttatatgarcctagtccgtcttttaatgatcgaatgcaattatcgttcatgtggtacaaagaaaggtgaccagaatccctaaatcttgaagtttttctagtcatctatgaaagcctctagttctctaacaggtattttcacaaagaccttcagagtaaactcatttttactgctaactagggctttggacccaaacacctctctgctctctttccctggtgaagtaacctggatctcacataagcttggcagacagctcctatcccttgggctaaggattaataaaaccagccccagcagtgaatccrttatttccttcccaagtcccacactgcttctggcccctggcaaagccactgccctggcacaggttacatctgcccagaagaggcaggtttcctaactggtgaagtcattatacacatctgcattgcccaatacagtagccacaagctgcatgtggcaattagttcctcagatgtacaagccacatttcaactgctccatagccatatgtggctagtatacagaatattttcatcatgcgctactggacagtgtgccctaggattccattttgttctcaatttgggcaaacattgttcttggacttgggcagactttatctcccacttaaggtcagagtatgcaagggtttattcatttattcattcaacaaatatttatcaatcccttgtctaactactgaacatataaccacaaataaaacagacatggcacctactctcatggagcttacattctggtcagaaaaaaattaacgataaacaagtcaacacctaatggaaatgattctttcagctatgaatttcagtattagtttgtatcatttttagcttcatggtaacaagatattttggtttcattcaagtggatccatccccacagcagctggcctgctttctcttgattttcttcagatgacagtaactaatggttttaatatttacttgaatctagagtttcttcrcctttgtttctttagaacttttactcaaagcttaattcttgcctctgtccttgattctgtcttgaaaggttctccaaactttaacttttcaatcatcagttttaaatgtaactcttaactatttatattctcaaatagtacaacaaactactaggcattcgcccttggaagataccacctcctcagctccttaaccttggcgatagttcttcagaatttctcttgaactattacctttctttcattcccagtgggccatactaactaagctgtcatttctcatacatgaatctctaaaacaacctccccaaaaggtttattgtctcaattttgtttccttacaattggtcatgcacactaaatcacaactactttaaaaactacttttaaaagtgccagtcattgcctctctcaaccttctctgcactagggaagctcccttgccccagtctttcacccctgaaaatgtacacctgtgccaagtgtgttcccacctttctcygtttgagagcacctgtcaggtgctaagcccaccactctctgcagtagttctcaagcaaccagagayactaacagaygagagcttcagcagtttggcagccccacatcccccgacctcacttaaccctagtcacagcttccaaaccagcaccacttyaagggatattggcatagcagccaagttcattggggctaggacttccaaagtcaggacagctggctctggggctaaaattgcagctgtgtttgggagcctcaccattgattatgccaagaaccctgtctgaagcaacaagtcttctcctatgccattctggggctttgcactctatatatgtcagttttttgctgcttagaacatctgaaaatgggtaatttatttttaaataatttatttcttacagtttaaggagaacttgagtccaaagttaagagaccatatctggtggacactctctacagtcctaaggtagtgcatggtatcacatagcgaggaagttgagcatgctaaagtgytagctcaagtcactcttcctcttcttataatgccaccagttaatccattaactcattaatccatggatagactaatctattcctatggacagatctctcatgagccaatcacctcttaaagtccctacttctcaataccgacacactgggtattaagtttcaactttggagggaaaaaatatttaaaccatagcaccctcttagaggccatggagttctttggcctaagggtggcttttctcatcctcttcaccatgtaaagaagctgtccccaccattaatagttctttcctccatgtctcatctatcttgtatgttcttttccctayaccttctcaggcaatctgagaaaagtggttggctcaaggtttgacagagggaagacaaataaatactgcatcttattagtcggggttctctagagtgacaaaactaataggataaatacatctatatctatatctatatctatatctatctatttatctatctagggagtttattaagtagtattaactcacatgatcacaaggtcccacaataggctgtctgcaagctgaggagcaaggaagccagtctgagtcccaaagctgaagaatttgcagtccgacgttcaagggcagggagcatccagtaaaggagaaagatgtaggctgggaggctaagccagtctaaccttttcatgcttttctgcccactttatattctggccatgctggcagctgattagatggtgcctatccagattagggtgggtctgcctttcccagcccactgactcaaatgttaatctcctttggcaacaccctcacagacacacccaggatcaatactttgagtccttcaatccaatcaagttgacactcagtattaactatcacaagtccaccccttgacaacttgaacctatacacgtctcctgagatcatacataatcttcaaataaagacaataatgaggtcataattacacctaatataatacaactatcctttatacaactagaaacgcaccaatccccaacccaaatgctattccatagagttaacaatacttaaatactgacatggatatgaggtcaataaatcttatgtcacatgataaaggaaaaaggaaatgaagatattttcttagtacaagtgtgtacatgcacaaacatgtttttaacaaagaaggaagaaatatgacaattacagtcctcatttctgcaactggtcacgtggtcatagctggtattgatgastaccttcttctmctacccattctgtattccctttgcctttagcaagcacctcagcaggtcatggtttttttcmtggagtgacccaaaccttcattcctgaagggtctgagccatctgcagtcctgcctggattgggctgctgtagtttcccattgaccttaatcacagggcatggtaatactaagagatgccctaatgaatctcctatattccctgcatacccttccttacctctgttgtgtagtagtagactgatttcgtcttgatagtctgggtcaatcaccccagmcagcactgtaacccccttcttagcctgttgacttaaaggtaggaggagcccaaagtgtccaggtggcaatcttaacttccagttcaaaggaatcattgttgtgtctcctggtgttcctccctctgsaactaagacttctaggccagcagaacataatattgtgggaacaggaagcaaaattttgctagtgggtcactaggagtaatggtgagtggtgccatcaaaaggccatcctgaagcatctggattgaaaggataatagaattgcctttggaagtcagaattaaaatgccaactaagtgacaatactttgcagggctggggcaaagttctccagaaggctgtgtatgctctgagccagcttccaatatacggtactgcttttcccatagccaggatatgcagagtccaggaatcaggggtggaagtggaagtggcacctcttattatcacccctagtgacccactagcaaaatttttgctacctggacacttggggttcctcctacctttaagtcaacaggctaagaagggagttacaatgttggctggggtgactgacccagactatcaagatgaaaccagtctactactccacaacggaggtaaggaagggtatgcgtggaatacaggagatccattagggcatctcttagtattaccatgccctctgattaaggttaatgggaaactacaatagcccaatccaggcaggactacaaatgacccagacacttcaggaataaaggtttgggtcactccaccaggaaaaaaacccacggcctgctaaggtgcttgctaaaggcaaagggaatacagaatgggtaggagaagagtgtagtcatcaataccagctatgaccacgtgaccaactgcagaaacaaggactgtaattgtcatgagtatttcctcctccttttgctaaaaacatgtttgttcaggtatacagaaaatatcttcatttgtaccaagaaaatatcttcattttatttcctttttcctttatcatgtgacataagatttattgacttcatatccatatcagtatttaagtattgttaactctatggaatagmatttggcttggggattggtgtgtttccagttgcatgaaggatagttgtattatgttaggcataattatgaccttattattgtctttatttgaagattacatatgatctcaggatgtgtatgggttcaagttggcaagggtggacttgtgatggttaatattgagtgtcaacttgatgggattgaaggactcaaagtatggatcctgggtgtgtctgtgaggatgttgccaaaggagattaacatttgaatcagtgggctgggaaaggcagacccaccctcaatcaggggttcacctaattagctgccagcacagtcagaatataaagtgggcagaaaaatgtgaaaagctagactggcctagcctcccagcctatatctttctcccgtgctagatgcttcctgcccttgaacaccagactccaaattcttcagctttgggactcggactggcttccttgctcctcagcttgcagacagcctattgtgggaccttgtgatcatgtgagttaatactacttaataaactcccctttatatatagatataaatatgtcctattagttctgtcactctagagaaccctgcctaatatagattttgtcattaccctactcagtaatacattatgactccctattatctatggaatcaagtttcttttttatgaagttattgccttgaaaagataaccctaaaattgaataattctgttatttttaccattttacttaggagtaagaattataacctgtttggttctgaaaatgattttagacctttcaggcrgatgcaccytttggttcatgtgatatatacctgcatatgcctcattttatgtaattaaaagtttcctgataattatactcccagtttccaataaattcttccaccacacacacacacaacacacacacacatgcatgaagtagaagaaaagcttttagagatcatttactgagcttattgacacaaatgagagttttaagaagcacaagcaaacaattttagcatattttggccaactttatatatattaatatttcccatttccttgtcacgtgcatgaagcccacatcatgtctttttccacagggtataaggccctatgctcaatagcttgaattagtcacagaatgtctttctgttggcaacttttggattaacatccacaaaytaaaatcagctcaacctcaaactaaagtatctggttatcattaataacttcgccactggacagaatgataaaaaataaaaagagaaaactcattaatttattatgatctcaaactaaatgtttttctcttatgtattttaaagatctgagaagcaaaattacaatttgagtttattagtaactatctgagtccactttctgttgcttataacagaatacctgaaactggttaatttatatggaaaataatttatttcttacagttatggaggccgagaagtctccaaagtcaagggaccatgtctggtgagagccatcttgctggcagggattctctgtggggtctcaaggcagtgcagggcagggcatcacatggggaggaaactgagcatgcttactcaggtctctcttcctcttctgataaaaccaccagtcacttctgatgayaacccatttatctattaagccatgaatacattaatcagttaataaaggyaggttcctcactatccaatcacatcttaaaggccccacctctcaatagtgacatactggggattaagtttcracataagttttggaggggacatttaaatcatagcagtaactgaagcagaactactaaaagattgttaaaatattctaatcaccttttcaaaaatatataattcctttttcatgagggttaaatgtataaaaattcaaaaattcaagtcatttttttttttagacagggtcttgttctattgtcccagctggagtccagtggtacaatcatcagtctctgcagcctccacacttcctgggctcaagtgatccttccacctcaacttcctgagtagctgggactaaaagcatgtgccaccacccctgactaatttttttaaaacattttttgtagagacagggtctttcaaccctggtctcaaacttctaagctcaaatgatcctcctgcctctgcctcccaaagtgctgggattacaggcttgagtcaccacacacaggctgtaatcccaagtcacttttattatcataacctgctttagtaatcaagagaaagaaaattctttttatccttatgtcatattttattatggttgaattaattcttatagttagagtacatcctaaatacaactaaagaagttaactgatgcttaaagttactaaagcccaaattatttttacttttcttttcttcataataatgtctgtttctgttatcataaatgtagtggtctctgagaagctatgcacttttatatttgttaytcagacctcttgaaaaatgttcaaaattattaatatacacaaatgtatagaaaatatccatatacattaatatacagaaataatttcctctcagtagaggagactagatcatagtgaatcaatgtttaacccatttcccaacaccatttaacatgagcttcaggccactagaattacctccattgacttagaaaagtacagaagacataagtcatatcaaagacaacaggaaaatgtttaattgtgtttaagtgcttctatatttgtatgacaatatttatttaacaaacattgatatagcacttgctacatcaggcaatgtttcaagcttttttaataaatattaattcatctaatcctcataacaaccttatgagttaggtaatatcatccctatttttcaaatgggaaaactgcgcgtaaaagaagtatcttgcctaaatccctagaatcaataaatggcaaagtcagaatttgaacctatgagtctggctccagagtctgagctttcaagcactactccatcaggctacctctcaatattctaaatcatttccatatttggaatctgatttaatataaaggtgttatagcttttagtcgtgtaaaaaacttttctttttgagatctgaaagtgacttcagatctcaaacacctaaggagacgtgctggtagagatctgaaagtgatttcactatgtggctgctcccacacaaacacccaatgtctccttgactctcatcccactagctcatgtacctcctgctcggcatccaccaaact

SEQ ID NO: 1591 - DNA, 77115 bp, Homo sapiens
  misc_feature (1)...(77115): n = A,T,C or G, or insertion/deletion polymorphism (see Tables 1-2)
agtctggacaacaagagtgaaactccatctcaaaaaaaaaaaaaaaaaaaaaaaaaaaatctatattcaagtctcacctttgagactgatctcccatgtgttttgagcaagtttctgcacttctctgggcctcactttttccatctaaatggaacccaagtagaactgctttaccagtggccagtctcagcacagtctcagccatgaccacaataaccacgagactgatgtcccagaaaacaattagaaaaaaaaacaaaaaacaaaaccttcagtatttttgggttaaaacaatcacttgaaactacatctaactttttctgtctcctattctacaacaaacatttttaaagaggaatattcttgtcttagtccatttgtgttgctataaaagaacacctgaggctgagtaatgtataaaggatagaggtttatttggctcacggttctgcaggctgtacaagaagaatgcaccagcatctgcttctggtgagggcctctggttgtttccgctcatggagaaggggaagaggacttggtatgtgcagtgcagagatcacatggtgagacaggaagcaagaggaagtgacagcacaggtgtcaggctctttttgacaaccagatttcacgggaaccaatagatcaagaattcactcattactgtggaaatagtcattcttgagggatattcccccatgaccccaacaactcccattgagcccactgccaaaatgggggatcaaatttcaatgtgaggttttagggggacaaatatcgaaactatagcaatccacttcccccacactcaaaatcattagcagatgctaaacaagggaaacatacataaatggttcaccatccatttttgtaaataaggctttattggaacacagccatactgattggttgatgtattctctgccactgctttaaggctataatggcagagttgagtagttgcagctatggtacacaaggcctaaaatatttgaatayctagccatctacataaatcattcatcaatccttgatataaaataacctagtaagaaattgtcagtaaaatgagaattcatggataagatgataaaacagcaaaatgacataaaaagtgagactgaaattctaaaaggggaaaaaaaactaggaaccaaaacatcatttgttaccaataaaagtggaaaagcaaggaacacaatagacacctctggaaaccaaattactgccatagaaaagtagcctagataatcattgtcaatgtagatgaccaaaaaattaaattaaattaaattttaaaaagagagacagagagattaaataggcaaacaccacttaagaaaaaacaactctcacctcttaatgtgttttaatctccctttttaaatagaaagtaatcttttaagaaaagctctcccctgtggtgacaatacaattatttgaagatcagagattcttagtttaatatgagttttctcccttctgttaaattataataaaattatgttaaatttaaaataggggccttttatgtaactgtttccctaaaagtgcagcctagcctaccccttctatctttatatttgtacagaaagacattcaaaatgatgttcacctagttaaaatcatgattgctattggatggtgtgatttgagggtgatttttagtcgtctctgtgttttcctatattgtttaaaacttaaatcattcacttattttcttttttaaaagaagataatttttcttaaaaacaaagactaagatgttattttttggatggcgccatatggatggtggctaccatcttcctctgtataatttaaatttctcctaaacaatgctttgaatatttttattgatttgttttttgraactgcccacagtatctagcataagcaaggcacataatccatgttcattaaaaatttcattgattttttttttctaaaatgtcccagggattgttcgctgttctcaatgacagtaagagtttaaaatattgttgacacaaagttacttgtaatttattttgtactttattaattacagtagaaatacaattgaatctctttgtaatattaatagcaataaaagaaaaaacagtttaaatagttttaaaatgccccaaagctttgcatgtcatgacaaaccacaaaagccaagtcatcgccacccatttttcacctttgttctcattgaaggagagcagctattctaaaacttgtcccccagattctcaaaacctctgatccactgtagctctggcagtcccgccttctcccaccccattctccggcttttctcaagctattattcttctaactctttcctgagcagcactttgccttttctaaagaagaggttatgaactttctagagcttgtcattcttctaccaattacctagatccacacaacaaaggaaagaggagaaaataaaggctggggatctccaagtgttcttccagcttgacagtttagtgatggctgtgctctcccatgaaggagagggcaattgattaaaatcattaagaaacaggaggtacagaattcagtgttcaaatgggcacgctctttatttagcgcaggaggtgaatttacccagtgggctggattaattggggaaggtggcctggagaagctggggattatgctgaatccaaaagaaggtaaaatttacttataatgaggagagaaaggaagaagagacttccctgtgagagaaataccatcagcaaagtgcagaggtagacatggtttgccagactctcaatccaggggtagaaaccacatccctgtgagggagaaaagaaaaggtgtgttgaaccaggttaatcaagagaagctcatcaactagtatacatggtcttaggtggtagcatgaccttagtaaatatgcagaaacatgtactaattatagggtcctgcctccatttggcagtgggggaatcatcctttccttgtctcctccagtcttagggttctacccatcttctgactgctgtatcagtccctggcctcctgttatttacccaacgagaatacaaagatgcgagagtggaagccaagaggtgggggcggatcacctgaggtcaagagttcgagaccaccctggccaacacggtaaaactccgtgtctctactaaaaatacaaaaattagctgggcatggtggcaggcgcctgtagtcccagctactcgggaggctgaggcaggagaatcrcttgagcctgggaggcagaagttgcagtgagccgagatcgagccactgcactccagcctgggtgacagagtgagactctgtcaaaaaaaaaaaaaaaaaaaaaaggaagaagaaaagaaagggaagggaagggaagggagaaagaaagagacagagaaagagaaagagagagagaaagagaaagagaaaaagagagagaaagagagaagagagagagaagagagcgagagaaagagacagagaaagagagagagaaagagaaaaagagagagagagaaaaaagaaagagagagaaagacagacagaaaagagacagacagatgctggagtagagagggcaacatgtgcttgtctgtctacgaaatgaaacactttggagtagaaaggaaaaaccatgtaggaaaaggagaagaaagaagaaggaagaaatcagctctcccctttcccccaaccttttcctggcagcttggagcttctaatggtcgacggaaggctccatcatcaccaaacagtgcagcgtacwgacacagccacctattctgaagccactggctctctagggctccaggcttgcctctccaaatgcctgatttggagcttcccttgaacgtctcataggattttgcgtcaagctcagcgtggccaaaacagagtccatcttcccactcaccacctgcttctgctcttgggtacgttttcttatcatcctcctctggtctttccagctggtcccctccttctccttcacatcccgtacatccaggcagctgcctggttatggcagcaccacctccagagcatctcttcatgctattccccctttttattcccattgtcacggtccatgcctgccccttgtggcctccctggcaaaagtcttctaactgttctccctgccttcattctcttccctgcctccttcaccactcccttgatgctgtggctgaggttgcctttctagtgccacaggcctgttgatatcctgtctcaggtttcaaaacacagatgaaggggccaggcatggtggcttacgtctataatcccagcattctgggaggccraggtgggtggatcacttgaggtcaggagttcaagaccagcctggcaaacatggtgaagccccatctctactaaaaatacagaaattagccaggtatggtggtgcgtgcctgtaatccagctactcaggaggctgagaaaggagaatcacttgaacccaggagttggaggctgcagtgagccaagattgtgacactgcactccaatctgggtgacagagggagactccatctcaaaaaaacaaacaaaaaatatagatggaaccccactgcctgtagcaaagtgtttagaccccttagtctgctccatcaagccctctgaattctcactctatccacatgtttggccccacctctcactccttctcctcactttccctrtttaataactaacacatcacttcatctacttccttagcctttatgatggtgttcctttagccagtatgcccattctattactcttctgtatcacttcctaagatatttgtttttccttccaggctcagttcaaacatttcgtccttctcctcgaaaccctgctggggtgtgcctagaacacagtaaaccacaamgcatttcggtgaagggatgaatgattcaatcaatcaatgaataaagcrattaataaaagatggatttcttgtctggtctttgaggtattcacttacattccaagccatttcttcttgcctgggctgagcttccccagagcctgcctgttctgatcgatctgcaacatcttctaaagtatgaatgatgcaccaagttaaatataggatttgactagtttttcttgcaggcactttggctcagggcatgtaagatcaactacaggttgggctacagcatggtgctctgagccctcagtttgaaattccagggattgggaaacactagcaagttcaaagccagaccaaacctgaatgtaatatttagaaggctgctccgagactatactcctggaccaaaatgcttaatacacacgtcagcatccttggctttccagagtgggtaggtgctgggagacaggctccagaaaaaaaaactaagctctgtggattccacgactttatgttcaccccacctaacccgacctacaggcctgggggacttcaggggctctgaccttcgtcctcctgccccaaatttccacactgacagctccatttcttcataggaatacatgctatcaagtagcacgtgccccaaagtgacaattatgtcatgactgcctgactctgaaggagctcttcaccctggttgggggagaacccaccacctctaggaaaaggaatagaagaaacatgtttgagttgaggcgtggaaaatataagcagaatacagaggactcctctatagacaccctgtgagtgacctaggctgatgcagagcaggcccgaggaagggaaagaggagagaggaacaaagaagcgaaggaaaggagactgacacagacaccgacagtgtctcatgtttataaaaaggtttcacggcttggaaagtaatttcaaatgtattatgtcttttgatcccaacaccaccacggtgggttacagcaagcagctataattttttttttttttttttcatttcataggtggggaaactgaggcttcgtggggcctgactcacttagagtcaaagagctagtcagaggctaatcctggatttcaaacctgtcttctgacctccagctgggcgatcttagtaccacaccaccatgcctctgaacktggctcttcagaagcaagcctctctgtaagtctggcaaatatcctacaaacctagcatacaactggctttttacaatgggtacaaagtatgggaatgtaagggagccccgcccaggtagctgaggacctcgggactgactttctggttcactctctggcctctcaattgctaagatctcaaacatgctcaaggtatgattaatttcactaatccttgtggacttctgtcatccagrtaaaaaataacaataataattgtcctcyggtgtctatatgccagcaagcactgcaggccaaaatcaaccctgggtgattatgaaagtggctctggtgaactcctgcctgtgcctcctgcagccacgtggaactattcaaaatgataatctggcatgtggtagtaactcagactggatgggtccatcactcacagagcagtgggcrcagcctccagagttcttatgtcttttgccagggccagcatttctactccaagctctcattcatcctctgcacaatttatttctgcagagtgcccttcatacacatcagcactgcttactttaccctgagagtcaatcaccaggtgccaagagaaagggaaggttcctttggggagatttaaagggaggcttagactcaaggtgactggggcgagagaagaagaaaagagggatggccctggtgcaagagaagaccctgactggaccctgagatgagacccgggaggccgtggactgtggaaggaggatgaagttgggcctggggaagagagatcagagaactgaactattccagcccctccccactgcaccaaacagcygtttgcccttggcactgagtttctagaggctttaattcaagttctgtcacccaggagtgggaactacttaataccactcctaggaattctgaatagaaggaatcctgggaagattgttaataattacaataaaaaatgacaggccagtcgtggtgactcatgcctctaatcccagctggaggctgaggagggtggattacctgaggtcaggagttcgagaccagcctggccaacatggtgaaatcccatctctactaaaatagaaaaattagccagacatggtgatgggtgcctgtaagcccagctactccagaggctgaggcaggacagtaagaattgcttgaacctgggaggcggaagttgcagtgagctgagactgtgccmctgtattccagcctgggagagagagcgagacgctgtctaaaaaaaaaaaaaaaaaaaaaagacaaatgttgggattggagagactcaactaatactatctctttctttcacctgaattcagaactgagaaagaggctcatgaattggacagatgaagacatgtgaaaacaatgtcgttgttaccagtaaaggtgaggatagagactgtatcataaacaggtttgtctaggtggcttaatttcactctatccttgttattgcttgtccacccatcctcagacccctctgaaattcaagcctgcctctagaaaacacactaagagaaggagagaaaggagctgaagcagctgcaggtaggctggctcgagaaaggtgagaggagggagcgcatccacacaagctctactccttctctcaaacatgcccatctgagaagtcatgaaggcccaagagctccctttgtggaagcttcccccctggaagaggacaaatggagaataagtgtcctgtgccccaacacctgacatctgtgtagtcctttacagattacaaaacaccgccgtgcatttgcaaaaggagtctttgaagtaaccgtctaagtgactcaaattatgattttcatgcccactctaagcaaaatatggggtcagaggacccccatccatggcagagctggaaatcaaaccagatttcaagcaagtatttgaaatcaggtttaaaaaaatatacccaacaggtgaggtgagacactcttgcagccatagccattaatgactccaggagaggtgaatgggcagatggactgaggagtgcagcagaggaagttcagggacacttctcagtctaacaagcacttactgagcacctactgcatactgcatgctgtgttgcatactggggatagaaccgtgaacagacatgacccctgccttgtaaasctggggcaaaatgggaagtgtctagcaatcaagaggctctttagagagggaagcagccgcagaggtgatgtatgtgcacccctgggacgtgcagggatatttctggactcacatcccaagaggtgattcaagatgcagaatcagccccaactcagattggccttgggtgctcattaaacagcagtagccaggccaggcacagtggctcacaactgtaatcccagcactctgggaggccgaggcgggtggataacctgaggtcacgagctcaagaccaggctgcccaacatggtgaaaccctgtctctgctaaaaatacaaaaaaattagccagtcgtggtggcagttacctctaatcccagcaacttaggaggctgaagcaggagaatcgcttgaacccgggaggcagaggctgcagtgagtcaagatcacrtcactgcactccagcctgggtaagaaaagtgaaagtcagtctgaaaaaaaaaaaaagtggtagccaccatagcctgactataaaaaggtaaagctccctgctctgttattacatcatttctttgtgtttgcatttttattttctgcctttgacttgttttgtttttctctgggtcctctaacaaaattctttctccaaaacctcaaactcttgtgagatgaaccaaaataaggakaacttgcgaatgcccagacagggaatgagaagtgaaccatggtgctgaccagagccaaatgctacaggtgccaggaaggaccagaaagggtcaagaaaacaaagtgataaaaacgcacagcggggagatctagacagctccgtgttttgaatctccttagtttggtttgaaaacccatccaaacccaaaacaccggaaaacatattcttctttattaggtagcccatgtcttccattttcaggtttgctgagaaggaaacagtatccaaagkctgggaactgtcctcttatgttcacactataaagtcgtctccactagcatctaccattcccatgccattttaaggatctgctctccaatgatagagcctcaaccctcagtcatgtttttctaggatatatgcagtttccccatagagcaggaaagagcctaagtggatgacgttcttctagtagagcttcatagcccttttattacatacggctttcttcatctgtccyatggataaaaggccagccagagagggcagggcaacattcaacccacactcaataaagaggattatttgtaacaagcatttaatgtcttttcaaagcttaataatcagtgaccttttcaagatttctcaatttgctggaatctacctcagtcttgataatgatcatctgtggcttctgttatcctggaatctcacatctggctgggcttgttcccccacaggaggtttaatttatgtgcaataaatgcatccaatctaagagtatagataaatgaatgttttacagcatcagtttattatttaaatatcatgtggagtgaatcaagcaatgattttgctgagtggagtatctctctagatgcttattataataagcctcctggtcttcgctatcaattaatcaaaacctatcaattggccacatgcggtggctcacacttataatctcagcactttgagaggccgaggcaggcatatcacttgaggtcaggagttcaagaccagcctggccaaygtggagaaatcccatctctactaaaaataaaaaatgagccaggcttagtggcaggcacctataatcccagctacttaggaggctgaggcacgagaaccacttgaacccaggaggcagatgttgcagtgagctgagattgcaccactgcactccagcctgggcaacagagcaagactctgtctcaaaaaaataataataataaataaaaatttataaatttttaaaacctatcaatcattttatttttaatttcttcgatagctttattgaggtataactgacataagatttatatgtggtacaccaatgaaactgtcacaattaagaaaatgaacataaatattaccccactccagatttttcttacgacacttttcttccttcttgctcctactcactacccccatcccagtaaccccaaggaatacatgctttctattgctatagattacattgcatattctataattttatacagatgagagcatacattatgtagttttctgggtctgatttttttttcactcagcataatcattttcagattcattcatgtttatgtgtgtatctgtcattccttttagttcccaatagtccactatgtggatataccacggttggattatcccttcacctgttgatggacatttagatagttgccagcttgaggctattagaaatagagctactatgaacatgtgtgcatgagtctttgtatgaatacgttgtttcctttcttatgggtaaatacctaagaacaaaatggctagatcatatggcctatctatgtttaattgtgttaaacttctcaactgttttccaaagagattttgccattttatatccccaacagcaaattatgagtgttccagttgacccatactctctccaatacttggtaaaattagtcttttaaattttagctattgtaatggatgtgtattaatatttcattttaacttgtagttagtatgcagtgtttgtaggtaagtaatggattttcatcatgcttttaatttgcatttttctaatgattaatattgttcaggagcttttcagttgctttattttcctgctgtctatatatttctttggyaaagtgtctcttaaaatctcttgccaatttctaaaaatctgtttgttttcttattaagtttggggagtactttatatattctaagtcctttattagacatgtactttgtaattattttcaaccagtctatggcttgcttttctattcatttaactgagtcttgtaaataacatacgaagtaacttttgatgaagtttatcaatttgttattttatggatcaggcttttgatatcatacctaagaaatcactgattaaccctaagtcacaaacaccttccctaggttttctgtagaagtttaacagttttagggcttacatttaggtttatgatccattttcacttaactttttaatacagtgagagrtatgggtcaatgtttctttttttttcttttttttttagacagagtcttgctcttgtcacccaggctggagtgaggtgatgcgatctcggctcactgcaacctmtgcctcyggggttcaagcgattctcctgcctcagcctcctgagtagctgggattacaggtgtgcaccaccatcctaattttgtgtatttttagtagagatggggtttgaccatgttggtcaggctggtctaaaactcctgacctcgtgatccgcccgcctcggcctcccaaagtgctgggattacaggtgtgagtgactgtgcccagctccagtgtttattttcttgcatagagatatccaaatgttytagcactatttgttgacaaggctgaataacgtgtgactatgttatctcatttggactttacaacaaaatgttttaattcctatgctacgtaagaggctgaagtgtaacaaggttaagttactgagccaagctaacacagaaagctgtggcttttgttttgactataacttcctctcgatatttcaagactctgagctttttctgtgtaccaaaatcttgttgagmgcagcaggcgatctggagrgaaagaggtggaggaggaaaaagtaccatgtctccagagctggagggcccaagataaaaagcaatgcctttggcttccttaatatggcctctttgctccctgaagtgagcaatagctttgctcatcttcrcccctctgccctttcttttctgcactgagggtactacatctgctcatgcacastcactaacaaagattcctgagtgatctgacatcctctcagacctacttaccaagctgtgcttcctggtccaggactgggtccacttggagaacagaaggcaccctctttatctacccccaaatgtcctatgsgctagcaatggcttttcctgttcccctggcccattccttgactgggaatatttttaaagcaagaggtactttactctttggggtactgtcacaggagattctccctcaggcctggctcatggtcccygatccttattgaataccccaaactgtatcctagctagtgataagtctggttgttctctttcctatctccgtgtgtctgcatgagcggctgtcacttcatttctggactttctgcctctaggacatggactgattttatcattcgctggcttctctttaacttccttcctttctccccagggrcaagggggtgcatctgttttcatgatctcccatcttgaatggtaatcagtgttccaccagacgtggcttcccatatccttgactttatcttaataaatgacccatcatatttagcagaaatcattgcgtctttgtttagggattaggactagagatatatttaaactgcactgagcactggtaatcctgaaagggctgaagcaattctgataggatgatggggccacagcagttagcgcattcgctcagttgcagatgttattaaagcagctgtccgttctcagcacagaagagataagcagggattggtatgcatgtgcacatatatatacaggcttgctctggcatgcatgggtgcatgcaaacacacgtgcctgcacactccaaagcatgaactcatgtaataatgcttgtatgcctaagcaaatcccawgagcctgcacatgcacattcgtgtgtaggacatatctcttcatgcacatgtaaacatatacacccattttcaaaatgttgcaaataatatgaaggcatgtctatgtacatatacacaggtaaccacatccccacaattatggtggtaaaaatatgcaaacaaacagctactctgtagccctctggtacagtgtacagtgttcaggatgtgagcctctgggttccagatacagagtctgcaaaaagctccaggtgtcttatgactgcttcttcctgcttttgtgcacagcagtctctatctcctgggtgtcttagcagagccttccttggctaccttatgatgccaggtattacttgaaaaccctactaaatcctgatcaattcagcctccctttgccccaggagctgggacacctctaataacattaaagcatctcagctacctgcccacagtctgccacacggccactgccccccctactagtggccttgatgtttcattgatttattcattcattctgttcacaggtatttcttgagttcctgctgtgtctagacctgtgcaacgagttgaataggatacaaatgcatttcagatttatttctgtctttcaggatcttgtgggaatataaggccttcatacacaaaccagttatataatagtaaaagacagttatataatggtacaataatgctaagtgctcaaatgagcatgcactggggtccctgagaccacgtttggatattcactggaagcactactgagactcagcatataattgtcctcacacctaatattcatkacaatgatgtggtgaggatgcttagctaaatcataaggggaaaagggacaggcagagtctggtggaatccacgtgcaagatacctcacgctctstccaaccctcagcaacaaaaatgcagcaacatgtgtgtggtatttctgcccagggcagcccagtaaggactcagtgccaaggattttattgggrgtgactgcattggcacaatctgcctagcatgtaccaaaactccagcttcccagaatggaagcaggtgttcagcataaacaccacgtagacactgtgagccacccttatcaattagggaatgtattatataagcataggaaactggctacattccaagatgccaacaaagggcaaccttgtcatcagtcctttgtaaagagagtggtgtcaggtttgttccattaactcttctctgcacggagcggcaaggagaggcgagcagttctagaaaacgaaatatgagtctgagctgggaagagggcttttgaactgagtcttgaaggatgactggcatttaagaaggcacagggtgctagcagtggagagaaagacaaaagtttagctcaaagggagattaagcagggtagcaaggaaggacaaagagargcagaacaggattctctacctattcatcaaacataaatgcgatatttgctacaagttggaaactctgctaggcagtgagaacttagatccaatccttaaagaattataaaccaagaagggaaatagacaaatagcccatcatttcagtagcagggtcaaagaagaacccagccacatctgaggaagctctggaacattcacatcgtgtttgagacctgagatatgaggatttgctgggtcaagagggagaacagttctctaagactgcacatgcagaggcctagaggagagagaacatggtgaatccaaccttctattccaaattgctgctcctgggcaggctagggcagtatgtgtgtgtcttttgcatgtttgttctgttttgctgctaaatgagattcagatcagcagggcaggttcacattcaattatgtagctgcttatattgttgaatgtccatcaaatatgcaactayagcaggtccttgaataacattgtttcattcaatctcatttcgttataatgttgatgaaaaagaatccatttgcagccagggccactgtctgtgtagagttggcatgttctgccccatgtctgcatgagttttctcctggtgctcttgttttcatcccacatccaacagttgagcatgttaaacaaactgacctgctcgattttctgagactgggtgagtgtgggtgtacatgtgagtgtgccttgtagggggatgacatcctgtccagggctggctcttgcctggcaccctgagctgctgggataggctgtggttactcatgaccctgaactggaataagcagtttggaaaatgaattattggaaaatgaaagcttgtaaagtatatgataatgatayaaatgcatgacaataaatgatgcagcatgaaaatgctcagtgagcccacaagatttgtgatggtttcaaactgtgtggtgggaggasgtgctcctgaaaattctcactttgcaaacatttgttccttgatgtaacccaccaccactatgaccattgtcattcaccaattcaccaaaaatctgatgagtaattatccttttattaatctttctaaagtgtatgtttggcccacatttatttcagtgtttaatattagaggtgttcgggtcttcatttagaagtttagtgatgttytcatgacaagaaatacactgtaggaccttaactcttgtttataccaatgagcctaagggaaaattggttttgttgtctcttgcttcacctaaaggtgcagtttccaaggacctttggatgatggtaattgagggcttactgtattttatagcgaagacaccagagttcgtaactgttaacagatgttctcattcccctggttatccctggttctctaactcccatctaatgtgttggcaagtccttttgtctgtacctccaaacctatcccccatcagaccccctctcaccatcttcactgctatcctaggagccctagagaccagcatctccttcctaagcagcatcaagagtaaattaaaccaggtaatatctctgtcctgtaaagccttacaaatactgaccattgcatttgctgaaaggttcatactgcttaccaatgcctaatgccccagttatctgtcccctgcttacctttccacccttggcatatttctcttccttccactcagtggactgggtgccctggtcttctttctgtccctggagcacaccaaggttattcttaccccacggcctctgcactggccgttccctttgcctgcaactctcttttcccaggtcaccagctcactggctctttctgatgctgcaggtctctgctgaaaagcagctccgcaaagaactctctcagcttctgtatctcaagctctcccttcatcccccgcccccaaaaccctcctctatgactcactgttattttctttatgtaactatttatccccatctggattcttcccccgtttggattttattgtctgtctcccatcaatggcaaagtaaatttcctgacgccagaggtcttacctagcttgcctggcrtcttcttcaacaagtatatgatcaaatgaacgaaatgtttcttggctagcaagtggttggactggggaattaacagagaacactagacyttctcttctgcctgtcttgggacacagagcattcaaatccctccagcagkgggaggaagaagaaatacctggcagatgtgacacagcaaggagacctgggcagccagtggacagaaggacagtgggcccggaggacacccaccagcatacttgctggggcagaagaggggactgtggccagtccatctacaggcaatgcaggggggcaagctgagccagcagccttaagaggaaagagagagttggtacatgaattccaagcgagtgcagaaagatcatccagacacatgggatgttctgattgacagcagagaagcaaagcaatgagggaaacagaggcaggcaggcaatgtcaggtgtggtagccaggcactagctgctaatctgggctttaaggtcacaactctctcccttgggagaactggcaagagtaaggctggcctaaccctggaagagcgggggcacccaccagagtggcagttcagaacctcccgatctgcatagggtgcatttggtggaattctgggcatgaccaaagatggggtgcctgagctggggtgtgagggaagggtgtgaggagcaaggatggacttgatagggagcttctcctttcctttttttttaagtacaaaattatacatatatttatatatataataacatgacatatctatgtacaacatggctgggacagttgaagaaactatacaatggtgttcaagagagcaagattctgtaatcctcttgctgcttctttyatccagcaggaagcttgtggttgatgtcagaggcccaggcagcaggagttggcacactgctgtcaagtggccacagctgtagctgttaggagatagagtagcaggaacagggagccaggaggtcattaaaccacagagccaagcatgaacttgcctcattcacacttttcctagggaacagacctgaatggacttatctcgaaccaccaagaaaagaggctggaatagggctttgggagcagatctctttagcaggagagagaatggtgccagcagcccttcccaccaacatccggcyaagctgtctgcattgaaacacagagctcagcaactgcagcagcttaaaatgcattctattctatctctgctcccagcatctgcagaagctaagatgatgttctttaagggcaaaccatagacaccttccatctctggagggttaaatgtggagaaggaggaacagaggaaaggtccctgcacctgtgaacgcagccccttccccacatgcagtgaaacttgatgaaacagcccttcctgttggcacctctgggtcctgggtgggcctgagtccatgccactcactgatggggaatagcatggctctgtttgcatggatgcaactccccagcagatggtgaatcagacctcgatgtctctgtgtgcgctttatacattttacttgttggtaatgaatttacaaatcctttaagtatggaaaacagagccttcccacaagctgaacagatgggagagaaggctttctaaaggctcttcaaagtggcctttttcttcaccccctcctggcttaatatctctctctatgtctacaaatgctttattagctgggggtgagagagaaccttccctgagtctctttctctggttccctagaaaattccaggcaggcctgccccggctaggaacgcattagcaagacagcactgggccctggccaagaaccttcattcaacattgcattcctggagtgcagcataactcatggagagaaaaaaggaggcagaacctcttgcaaagctgcccctgacttctctggcagggaaagaggttctcttctttgtggtgagagcttccttctgagtggccagagtgtggtggattgaatgggttcaagctgcaagcactgcagcagactgaactaatgttttaccttttcctgatccataccctttgccgtatcacttttcagtgcaccttgacgctgaacttggcatgcggcttgctttggccaatgggatattagcagacataaagcaggctaagaatttgtgatggttaatttcatgtgttcatttgactgggctaaaggatgcccagatagcagcaataccttatatttgagtgtggccgcgagggtgtttctggaagacattaacatttgaattggtgggctaagtaaagcaggtggccctcctcatacaggtgggcatcaacyaacccactgagggcccacataaaacaaaaaggtgggaggagggcattttgctctctgtttgagctgggacatctatcctcctgctctcaagacttgagttctctgggtttcgggcctttggacttggactgggacttaccctattgactccccctagttctcaggcctttgggtttggcctggaactacaccaccagttttcgtgggtctgcagcttgcagatggcagatcacggaacttctcggcctctataatcacatgagccaatccctactaagaacgctctttctatacatctatgtatatcttactggttttgtttctctggagaatcctgacgcatacaggctttaaatgaacttgctcacagaagcatgtttcttgctccatcagaaggacgtccctgggtaagctcgctggtcccagaaagaggagacrcatggggctgagccagctcccttcccgctagacatggacccaggatccaaacaggcagattagatgcccacggtcaagagcctggatcacgtacttcctctcactctcagcatctccaacacagagcacccatgtagaagaaacaataattacataaacggctatgatttactgaacttatgctaaacaaagggataatgattatattcatcttatagagttgttttgaagattaagtcagatgataaagtttattccttttttaaagatttaggtttattgtcccacttaatctttggcccacagttttttggcccatgacaagcactaaataaakgtcattttttttgcattatttacatgcattaattttaatcgttaaaacaaccctcaagttaaatatcattatctcattttacagatggaatactgaagtacagactayttaagtgatgtggccaaaattacacagccagatatgtgggagagctaggattgaaacttctgtttaaccctggaaataattaaacaatataaaacaagatgcaggacaagtgcatattcagattttggacacacagtaaatgctgaaaatamcataaaagagtaaacctatattgatacggagcagggttttgacaacttgacactcctgacattctggaatggataattctttgtcatacaaggaccagcctgcgcactctaagacgtttagcggcacccctggcctctcacccactagatgccagtagcacctcccctgcaagtggtgaccaccaaaagctgtctcctgacattgtcaaatgtttcctgagacccaatgttctggaagtatcaaggaaggcttcaagcagracgcaggctttgagaggtcctggtaagagcttacatagtagttcccatccttaaatttcaagaaccatttaaaaatcttaaaaataaattaagggagaacatttttttacttctcttaaaaaaaaaaccgagatacatgtgcrgaacatgcaggtttattacctaggtatacacgtgccatggaggtttgctgcacctattgacccatcctcttaattccctcccctcaaccctcacccgctaacaggccctggtgtgtgctrttccctccctgtgtccgtatcatctcaatgttcagctcccacttatgagaacatgcagtgtttggttttctgttccggtgttagtttgctgacgatgatggcttctagcttcatctatgtccctgcaaaggacaatgatctcattcttttttatggctgcatagtattacatggtatatatgtaccacaccttctttttccagtctatcattgatgggcatttgggttgcttccatgtctttgctattgtaaatagtgctgcaataagcatatgtgtgcatgtgtccttatagtagaattatttataatcctttggatatatacccagtaatgggattgctgggtcaaatgatatttctggttctagatccttgaaaaatcgccatgctgtcttccacaatggttgaactaatttacatacccaccaacagtgtaaaggcattcctatatatccacatcctctcctacatctgttgtttcctgacttaataatcaccattctgactggcatgagatggtgtctcattgtggttttgatttgcatttctctgatgatcaacgacattgatctttttttcatgtttgttggccatgtaaatgtcttctgttgacaaatgtctgttcatatcctttgcccactttttgatggagttgtttatttgtctagtaaatatgtttaagttccttgtaaattctggatattagacctttgttagattgttarattgcaaaaattttctcccattctgtaggttgcctttcatgctgatgataggttcttttgctgtacagaagctctttagtttcattagatctaatttgtcaattttggcttttgttgcaattgcttttggcgtttttgtcatgaagtctttgcccatggctatgtcctgaatggtattgcctaggttttcttctagggttttkatggttttgggtttcacatttaagtctttaatccatcttgagttaatttttgcataaggtctaaggaagcggtccagtttcagttttctgcatatggctagccagttttcccagcaccattaactgaataggacatcctttccccattacttgtttttgtcaggttggtagaagatcaaatgtttgtagatgtgggtagatttgttattttggaggtctctgttctgctccattggtctagatgtctactttggtggcagtgtcatgctgtgttggttactgtagccttgtagtatagtttgaagttaggtagtgtgatgcctccagctttgttcttttttgtttaggattgtcttggctatacgggatcttytttaattccatatgaaatttaaaatagttttctctaattctgtgaagaatgtcaatggtagtttgatggcaatagcattgaatctataaattactttgggaaatatggccattttcacgatgttgattcttcccatctatgaggatggaatgttcttccatctgcttgagtcctctcttatttccctgagcagtggtttatagttctccttgaaaaggttcttcacatcccttgttagctgtattcctaggcattttgttctctttgtagcaatcgtgaatgggagttcattcatgatttggctctctgtttgcytattgttggtgtaaaggaatgcttgtgattttttccacactgattttgtatcctgagactttgcggaarttgcttatcagttcaaggagattttgggctgagataatgggattttctaaatataaaataatgtcatctgcaaacagagacaatttggcttgctctcttcccatttgaaaactawttctttctcttgcctgattgccctggccagaacttccaatactatgatgctgtactatggtgagagagagcatccttgccttgtacttgttttcaaagggaatgcttccagcttttgcccattcaatatgatattgactgtgggtttgtcataaatagcttttattattttgagatatgttccatcaattcctagtttattgagagtttttaacatgaagggatgttgaattttatcaaagatcttttttgcatctatggagataatcatgtggtttttgtctttggttctgtttatgtgatgggttacatttattgattgctgtatkttgaaccagccttgcatcccagggatgaatgaagccaacttgatcatggtgggtaagtttttcaatctgctgctggattcggtttgccagtatttttttgagsattttcacatcgatgttcatcagggatattggcctgaagttttctttttgttgttgtgtctcctcccagttttggtatcataattatgcyggcttcataaagtgagttgggggggggggtctctccttttcaattgtttggaatagtttcagaagaagggataccagctcctctttgtatttctgctagagttcagtcgtgaatccgtctggtcctggggtttttttggttggtaggctattaactactgcctcaatttcagaacttgttattagtctattcaggtatttgacttcttcctggtttagtcttggtagggtgtatgtgtccaggaatttatccaagtttttctagattttctagtttatttgcatagaggtgtttattgtattctctgayggtagtttgtatttctgtggggtcagtggtaatatcccctttataattttttattgtacctatttgattcttctctgttttcttattagtctagctagtggtctattttgttaattttttcaaaaaaccagctcctggattcattgaatttttcggagggcgttttgtgtctctatctccttcaattcttctctgatcttagttatttctcgtcttctgctagcttttggattagtttgctcttgcctctctagctcttttaattgtgatgttagggtgttgatttgagatctttctagctttctaatgtgggcatttggtgctataaatttccctcttaacactgctttagctttgtcccagagattctggtccattgtctctgttctcattggtttcaaaaaacttcttgatttctgccttaatttcaatatttatccatgagtcattcaggagcaagttgttcaattttcatgtattagtgtggttttgagtgagtttattaatcctgagttgtaatttgattgcactgtggtctgagagactatttgttatgatttcagttcttttgcatttgttgaggagtgttttacttccatttagtagtatttgcatataccctatgcacatttcccatatactttattttttaaagaaatttgtatttccataggttattggggagcagttggtggttgggtacctgagtacgttctactggtatactttaaatcatctctagattacttataatacttcataaaaggtaaatgatatgagtagttgttattttgtggttttggttcctattatatttattgttgtgttgttatttttattccttttttccaaataktttttatctgtggctagtttggtatggtttatgaatgcacagatatgcagggccgactgtattagtttcccagggctgccatagtgaagtgggtggcttaaaacaacaaacgtattctctctcagttctggaggccagaagcccaaaatagaggcatcagcagggttggttctctccaagcgctctgaaggagaacccgatggaagagccacatcaccctcctcccctcccgttggttgctggcaatcctcagcaggctttgacttgtagctgcatgaccccaatccctgcctttgctgtcacatggcatctccttgtgtctcttctcctcttcttataaggacaacagtcatatcggattaaaggcttaccctcttccattataacyccatcttgactaattacatctgcaatgaccctatttccaactaaggtctctttctgaggtaccgagtgtcaagtcttcatcatgtctttttgtgaaacacaattcaactcataacaataacgtctctgtgagatctcacagatctcctggatgatcttctctcctcccaaacctgtactcttcaggaataccactccctgttaatcccagaaggaatggagccaacagagatcacccctctgtaacccaagaactccatatgttccaccatcccttccatcaatttgtacccatgggatagtactgctgccccaccatatgcactggagttgtttttctgcagcaggtgcgatgcttttcacggctstatccatcctctcctccccagataccctgsaaccacccatggcctgcatctgtagaatgagagccagcgagctatgctccctctgacactatgaaggagtttggtttgatgataaaagcctacaagaaaatgcaagccttgttccagcagcacaatgtggtcagatttttwttttttttggccttctaggaccctcagactcacttaaatgagaaggggaccctagttttaccatgcatgttaaagttaggatattatgccaaacttctaactgccctgaagtggacagtgtgtaaatgatgggataaagggaggggggaaggaattgaaggaggtcccaggaagctatgctggggcagtgaggaagcttgaccttgtcaaagaaacaaataaacccctaggaaaaatcagtgggataaactcttaagaggctgattttgagagaacaaggatgmaggagagtcaatgacaaccatccacactggaagatacccatgaagaagtgggggataaaatccaccagcttctgcattgtgagcctcaccagctgggacacaactttgctctatggtctttgaatggaaagaccatggtaagagcagctaagtgctcggttctaaaaatgttgaagactgtagaacatcaaaatggccctgtagccaggcagatcattaccagggaaattctagtaatagcgaccaagagacccatccaggaaaagtcacctttaacacaggtcataggaaacagcattagctgggggctgtatggctctgggcctataccactagcttgagcctccatggcctcatctgtaaaacagggacatgtgaaatcctcaaaagtcctctcccaaacttacagaccctgcatgtggccccagggatggaaattgaggagaaattttcttctagcaccttttccaacctgctctctcatttgttttctcttagcaagcctcccaccttgtcgcaccagctgtgggtttcttgttagagctccaacctcataaatacctccatggccagaaattgtttctctaaaaatgtaatatgcatgcaaactcaacatgtgaaaccccacaacaattgaattcttctgtaccccaaaatcaattgtcaaagtgcacataaaattacaacagtgctaagctttccataatgaggtgattgtgctaagygagcatctgatttaagaagtggctcagcagtacagggcttcgtggcatcatctaatcaggctgcagcaggaaacatgctagcttccaagtgagcagaccgcagtggaggggtgagcaggcaccatgccagtctggaggtgtggtggggaggagttgggctcacgagtgaggaggcactccctgattcaggcccccccagtcttcaacctcttcccccaccaagaaaaatggaaattaaagctttgaggacagagagggagcaagagaggggaggcataaataaaaagagggcaagcagggtgagagggctgcagagatgaacacagatgacyggcaggagtgaaggtctgctccgtggacagagacaagctgctctgacatctgagcttggcactggatagaccttggctagaggcacagctcagccctggagggtcagagtctgtcctttgtcctcctttgcaggaaaggagataggcccagagcgacgggataggtgttagccatgaaggagctgggagtcaccctaagtctsttcacacccggacacattttcccacctgcttgtcattttccaaaatgctgctattactttagcttttccagtgcaatttttgggtcacactgggctctctccctctgtttcctcctttatagagcaaatatgccctagaggagtaactctycataccttggtagcactagcatgtgggagaagaggggtagacatcctggaggtaaacatgcatcctcaggcatggatgtattatctacatctcaagggccagacactgagcaaggggtaagtgcaatgcagggatggtggcatggcacctcctgatctagtgtagaagaggatgataaccccacacacccagcactgagtgtgtgtgtgtgtgccagtagggagtgctcaaggtgaagggcaggagggaggaacagagcggggcccatttctcagggcaagaggacttctgagcagagtcttgaaagaactacaagatttagcaaagagaagaaaggaagagaaaaagtatctgcaaatgcacggaggccaagaaacagtgacctgtttgaagacagatgagaggttctgaatggctggaatagaatttggcatctggagaagcagcaagaattgaggtgggaaaggtcgagacacagctgacaccacctgactcaatgaatgttcaggtggaatggaaaggtctttcctggcccagatagtttccaagttccaagaatcttccctaggattcactgaaatctcaaaacaaccactgcctgttagctttgagccagccacctcactgatcagagacttcctgtctctccggagcatctttctctctcaagagtgtcttttggggataatcaatgagatcatttctgggcaatccacctaaaaagggctggtgactcacaacactagatagttggggaagcctgtggtaaggaagatgctggagggagtggtaatagttatgggtcttcactctcttgcctggaatcatgattaatgtgccagtagttcagtctgagtgagcctaaacatatacagatgctccttgacttacagtgggattgcatcctgattagcccattgtaagctgaacatatttacatcagaatgcatttaatatgcctaaccaactgagcatcataacttagcctagcctaccttaaacgtgcttgtaacactgacattcaccaacagtcaggcaaaatcatctaacgcaaagcctattttataataaagtgttcagaagctcatgtaatttatgaataccataccaaacgtgaaaaacagaaaggttgtggggcaaatgaacctgggttagaatcttaacttctccagttattatgggtgtggcttcagtttctttatctgtaaaatcgggataataacaataccttgcctcacaggataccaggaggatgaaataaaataataaatgctaagatcttagcacagtgcctggcacagaaagatgctgaataaatattggcctaaaatacaaaacaaaaaaattacaagtcaaagcacttacctaagatgattctcaggtctcctttgagataagcacaagaatctagaacttcaggcttttactgacttctaagaagaggatgaccccaccccttgggaagttttccttcctgctcagaagtggttgctggtggaagagactttccccatatcaggtctgaatctggaagggagataactccaaaacctgyccaaggacagagcaggatttagaaaggagaaagtttctttgccaagctccctcatagaaatccagcaagataaagcccttacccaaatagcaattgactaccaaaaaaatttcagacattacaaacaactgtcaaaagttgtctggctggctgggcacggtggctcacatctgtaatcccagcactttgggaggccaaagcagacagatcacctgaggtcaggagtttgagactagcctggccaacatggtaaaacccaatctctacttaaaaatacaaaattagctcggtgtggtggtacatgcctgtaatccaagctacttgggagactgaggcaagagaatcccttgaaccccggaagtggaggttgcagtgagccaagatcgcacagctgccctccagcctgggtgataggagcataactcagtctcaaaaaaaaaaaaaagtttgcctgtctggcagcattatctcctgttatttacagtaagaaaactgaggaacataggaagcaagtgacctttcctaacaatgcatggccaatgagggacagaatgccaggcatctaactgttggtatagtttctcttagacttccatctggtttctgaagtggaagtgtagatcctagcaggagatggagggggacatgggggaatgattctgtttgtggctcaatgaggctatctcaggggcctgccttggcccttggctgggcagagtctgcaggtgagcacagttggcatatcccatgcccagatgtcacsaagtcagagcacagacatctctggggcaggtgccattggcccaaggacagaaagataagtttgagaacctctggcagtcacttggattctgacggaatcatctttgaatttttgtaggagttggtgctacgtctttagcccaacagggtactgaccatcactgctgyaccccaaggctgaatacttttccaggagggtttctgtcaaagactaataccactcaccctcctttccctccccctctctgttgtaggtggggggcacatttaacttatcatctaaataagaatccttttaagagtgaaaggaggtgtcgcctggaccatccaggcaaggggctctcatcttcaatcccaatcctaccaacccttaagttgagattgctatctaggtgggggaagctgtctttgtgctcagatgcaatcacaraggaacctattccagatgagaagcaggyagcaggagaaacattctcatgggctacatgtcctcttgggaaagaaagaacaaaagaagctgtttcaaagatggtgctagagggtagagggggaagaacacgcttctgaaaagygtgagtatctccaaaatacaaaacactcaaatgaatgcctcccacctgctctccaaatagacagattctgcccatccttcaaaacccagctcatgctsctcctctgttatgcctcgaaaatcacccaggcaccagggagcctcctcctcaggccccagttgttctcactttttagaccgtgggactttatggtttcccttgtaatttgccttatccagtcatctaataatttatccttgagtataccttttaacttctcyactaggagggcagggcagttttatggctacctttttgtaatagggtacatgtgggtgtatgtaaaatatatacatataataatatattatatgtaagtccactaaatttacatatattctactaaatatgatatacatataagcatgtacatatacatatatacatagagacacacttatatattcatatgcataaatgaaagtaagaattaatgtttagatagagagatgaacctactggatatgtttatctcaaaagaatcaaggagatattcccagagaacaagaagtcatttacctattaatgggtgatggaattttcactgtgggagtttataggttgagcgggggcatgatgtctgtgcttttcacacctacatctttggtttggggactggcattgtgaggatctaaccaggtggcttcatgaagtcattcccatcttgagatatggataaacataggggaaaaagtaaaaccaagggaaataactagctaccaagtgggcagcatttccaggaattagttgctcacccctttgctaggatgagtcatggttttggcagttgagtcattagtgcccgcttgggaagcttttccttattgatttctgctaggcttcagccccttgccaatcaacggcttggagacagaagactggacccagagactggytaacattccttttcagatttttaagattctggggatacttttctagggatctcctattcatttaggcagagatgagttgttktttttttaagcctcctgcctctccctagcctctacccacagaaagtaatgcccatgcttgccgtcccatcttgaaagctttcttccaaagtttagttactaattagacattatttataccccagaacacatgcacgtgtcatgctgctcagcatgctgttctcatgagctccctggtacacccgctgttcttaaatgtccccatcactccagctctataygctgactttgacaggcatcccaccctgtgaatcctctgtctgaacaactcttctaattcatgtatgccagaacmcagttactccagctccatccatcttcccaagggtcctttgycactggtcggtcgtgtgctggggaaagtcatgattgagatgctttccttctctcctccactgagggaagagccaggtcagtgagcccagaaggacagagctctctgtgagccacatgaggagcctcagtaagccaggagacctcaagataacacccacccacctaaccctacctcatctacacacacagcctcatcagagtaatccagtacaatttttaaaaatctatgtgatgatctttatgagtctagcatctggtaaggaagtagccatagattataatgcctgtgactccagcctcaactcttgtctttcacacatgacttctcatttaaaagaacaccttaatcagctgtaaaacaaaagccaargaggtgtgccaagagcttggagaaaaagaaaaagtctgacctagaatgttggaataattaaatccactgctgctcttccaaattacaaattggaatcacctgctcagggtgtgcccggctcactccatccctccccactgcagcctgattaaggattccaggcaactgactggtgttcccagacaagcaaaagtaaactccctcatctgcaagccaattcacataacagattccctaataargcatgaggaaaagctgccctggcacatctgttttgtcatgcatctccagcaaatcctgggacaacaggagaggcagaggcaatgctggtcccaaatatactcatcatatttcagtgaatggactcagtgtttaaggcttggtctcaaccattcagatagtattgaggatagttaggttcaggtgcagaattcattatgaagttatttgattcatttctcaagcaaacatttgctaaacgtctacaatgtgccaagcactgggttaggcactgaggatgtaggggaagagaaagtcatagaaagaggtcattgccacacactgtggggggtgctactgtagaggttatttgccaatttctataggaatatacagaggtcaggaccatcactatctaagaaagaaggaaaagatgaggagtcaaagaaagagccataagaaagcagtcttgaaggatagaatctggggagccattatgaaacctgagtggaaaaactggcttgcaatagatgaaagtatcgtgtcttcccctacacactagcaatacatagtcatatgttgggggtggtggtgcctcatggcaccagagcactctttctgccttcctcccaataccatttaccagctatttacactctgtccctggctcctcaaggcctttagaaaccctgctttgctctagtcaatgaagatgggccaaccaaatggatggagagtgcggctttgggaatgacgccttgtcaacatctcaccttttctggtgtgcctcagtctggggcccacctccagcttcctgaaaaccttctaacatctcactgctctctctctctacaagaagcgtctcttaacactctttgtacctttttaggtcagagacacccagcaataagtagcaaagcacccagcacaatgtctagcgggtattaggggctccacgttttagttaaaattatttttaaaaataatgaaattttagttaaattttagataaaattgtttatcatattcattggcttatatttataggtaagagaggggtacctttctctagaaaccatcagcttttgtctctctctctctctctcacacacacacacacacacacacacacacacccttacacataaaaagtatcatatttacatataggactgttcagatattagaacacatacagttattttcaatgcactaagccacacagataaaaatcctggccctgtctctctctgggagcttacagaccaaattctgctmgaattcaggatagcattctgtgcattctccctcatagagtgagaagatgaatctgctagggaaggaaacacctccmcactcagcaaatcaagagcaagaaccatctgtgttttccagaaggtcccagcaaaatgtaagaacaagagaatcttttgacatttcacatttctcttccctgggagaaggctgaatggaagttcttggatacatatatgtttagctatcttagatccacagggaagctatgggaacagtaaaagagccagatgagggggatcttcatactcgtagctgggttggtttgmaggatcagaaaaagaccagcctgagactgtaaaggaccaagtgagactgtaaaggaccaagtgagactctagaccaggcatgggaataagtggctgtcaggaaagagaycatctcagtgggaggaattcggttagactcctttagcctgstcactgaccatcaataaaatgggaatgatgaaacccgcaaaggaggtgaggattcttctcaactggcaaaacaaaccactatctatccttgacctttgatccttaaatgatgagatctcaaaaacttctcaaggtagtagcatggaaccacctctgtatccttcattttataatcataaagtttgccatttgcaaatatctcacatttaaacttgttttccttttgcataaaacatctaattaatcatattaaaatatttcatgggttacttttaagaaaagcctaccaaactgatatagaggatattaaagaatcatataatcttatccaattatatgtgtatagatgtgaaaacctgaaaaaaagggctcattttcttgaaaaacrtaaattactaaagtaaattacagaggagacacaccacttaaacccatcatttaccaaagaagaaatttgattattattattcttttttaagagatggggctcttgccagatgccrtggctcatgcctgtaatcccagcattttgggaggctgaggagggcagatcacttgaggtgaggagtttgasaacagcctgaccaacatggagaaaccctatctctactaaaaatacaaaaatcagccaagtgtggtggcacacacctgtagtcccagctactcaggaggctaaggcaggagaatggcttcaacctaggagggagaggttgcaatgagccaagatcacgccactgcactccaacctgggcaacagagtgagactcygtcttaaaaaaaaatagagagagatggcggtctcactatgttccctaggcttgagtgcagtggctattcacaggtctgatcataatgcactgcagccttgaactcctggtcccaagtgatcctcctgcctcaccctcctgagtagctaggagggcaggcctggcagaaattgattttttttttaatgtcaagaagctcttgcaagaaaaaaaataatgccaaagtgtttcacaaaataattgtctaccatgtaactaacaygtatctccagtactattttaaattgctcaatatgtttagaacaaaagatcacttccaaattacttttataaagttagaatagcattaatagtaaaacctgacaaatcaaatacaaagtaaaccggcaaactactttcatttgatgaatatcagtgtgtacattctacatgaaagaataatgcagagaatcgggcaaaagaccaaaagaataattatccatgaataaatgatgtatattccaaaaatgcaaagatagtttgactctattaattggccatatcagatgaaaagagaacctccataaatatctatcagatattaaaacatattacaaagctatggcaattaatacattacggtaccaaatcaaaaataagtttatcaggctggacacagtggttcacgcctgtaatcccagcaatttgggaggctgaggtgggtggatcaactgaggtcaggagtttgagtccagcctggccaacatgatgaaaccgggtctctactaaaaatacaaaaattagctgggcatggtggcacatgccctataatcccagctacttgggaggctgaggtacgagaatcgcttgagcccagaaggcagagcttgcagtgagccgagattgtgtcactgcactccagcctgggcaaaagtgagactctgactcaaacaaacaaaaaagaataagtgtatcaataaaacagagtatagaatccacaaatatatccaaatacacttaaaaatgtagtatgtaataaatgtggtttcacatattagtaaagatggatgagtcaataaattgtattcacagaatagccatccaacaaaaaatgaaagttacaatccctagcttataccctatagaataatcagcacattaaatacaaaatatggaatcacaaatgtaccagaagaaaacattagtttttaaaaaataatctcaacttggcaaagccattaaaaaaagactgtagtacaattatgatttatcaagataaattttgctacattaatttcaactttttctcagtaacaaaagtactataaaaaattaaaagaaaaatgacatgtaaaatatcagaaatatttatccaaacaaatatacaatgaactcccacaaatcagtaaagcaccaaaaactcaatatgaaaatatacaaagactgatgtatagaaaaaattatgaatagctcctaaataaaaagtattcagccccactcctaataagggtagtacaatggaatctcaataataaaccatgtttacatctatcatattagccacaaataaaacacataataacactatttggcaagattaggacaaaccagctgttttcatgaattctaagtyattgtgcaagtttatgacattttgaagggcaattttatgatatttataaaagttaaaatgcatttatcttttgagccaatgattcattactaaacctactctgcagagtaacatgytcatgcaaaattaatgaatatgttggatgattaatcatagcatcttttgcaacaggcaaagattgaaaaaaaaatctaaacacccacaagaagggcactggctaaataaatagtaccgtattacaatgaaatattatgtagccattaaaacaacaagacacttttataattaactatatgataaaaacttaaggtacatttttagttttaaaaaacaaggtgcatctttttcattattgtcctataaatcctagctaatgtaataacacaagaaaaggatataaaagagatacagattgggaggagaggcttcaagatgcctgactagacatctggtacccacctcctccataaagaaggactaaaatagcaagtagatacttagacttcaactagatcatctaaagcatggtctattcaacagataactcacagagaagtaaaagaaaacacgtaaggtgagaaaggagaggagagtgagatggcctactctactgggatctgctgggagcctagagaggctccccagtgcagaaaaggaggaaatgaatracctccagtactctacatttccaccatggactcctgcagtccgagccacaggggaggctcattacatgagggccctaagactaacataggcagttgcctggatacaacacaacagcatttaagggagctcaaactgggtcctacactcccccaagtccaaagcagctacagcacagcaccattttgagagcctagcactcaccaaactgcatctgccctacggcccaatagtctctgcatcttcagatccctggagactcactgacatcccctacccccagctggacaccactgctggctgctgctaccagggctgaagagtgtcattggtagcaactccaccactcacggtagcaggactactatgcatttaaaagcattctgaggaaatattaacctgcttatagccaccagtgagggctgaagtgtgcacttccaagccacctatttatggctgttgacaaagaaagcaccctgccctcccagcaacarggccttagtatagccgctgctcccacccaggcattctctcaggggcctgtggatcaccctgctcctgcctactacagcacagccagtgtccacacataccactggggggcctagggacagaggaagtgaatacattcttgggtgcgtacatcctatgaagattgaatcaggaagaaatagagaacctggacagaacaatgacaagtaatgagatttaatcagtaataaaaagcctcccaaaaaagcaaagtccagaaatggatggcttcattgccaaattctaccaacgttacaaagaagaattcacaatgagtctcctcaaactatttccaaaaattgaagacgaagaaattctcccaaactcattccatgaggtgagaatttcccaaatgccaaaaccagacaaggatacaacaacaacaaaagatacctacaggccaatgtccctgatgaacacggacacaaaatcagtttatcagaaagataatacaccatgaaaaagtgagatttatcccaaggatgcaaagatggttcaacatatgcaaatccataaacacaatacatcacatcaacagaatgaaaggcaaagaccataggatcatctcaatagatgcagaaagaaagcatttgataaaattcaatgtcccttcatgataaacactctcaacaaacagcacagaatgaacataccttaacataataagggccatatataataagcccacctctaacatcatactgaagggacaaaagctgaaagtctttcttctaagaactggaacaggccgggcgcggtggctcacgcctgtaatcccagcactttgggaggccgaggcgggcggatcacgaggtcaggagatcgagaccatcctggctaacacrgtgaaaccccgtctctactaaaaatacaaaaaattagccaggcgtggtggtgggcgcctgtaatcccagctactcgggaggctgaagcaggagaatggcatgaacccaagaggcggagcttgcagtgagccgggatagcgccactgcagtccagcttgggcaaaagagtgagactccgtctcaaaaaaaaaaaaaaaaaaaaaaaaactggaacaaggtaagaatgtccacttttaccacttgtattcaacatagtactggaagtcctagccagagcaatcaaataaaagaaagaaataagtggcatccaaactggaaaagaggatgccaacgtgtccctctttgcggatgacacgatcttttacgtagaaaaacctaaagactccaccaaaaaaaactcttagatctgataaataaatccagtaaacttgcaggatacaaaatcaacatataaaaattagtagcatggctgtacactaataatgaactatctaagaaacaaatcaagaaggaattccatttacaattgctacaaaaaaatgtctaggaataaatttaactgagaaggtgaaagaaaagctacaaaactctgacaaaggaaattttagatgtcacaaattgaagaacatctcatgttcataaattagaagaattaatgtctttaaaatgaccgtactatccaaagtaatctacagattcaatgcaatccttatcaaaataccaatgtcatttttcacaggaatagaaagaatataaaaaagtcatgtggaaccwaaaaaagagcctgagtagccaaagcaaccctaaacaaagaaacaaaataaagctggaggcataacactatctgacttcaaaatatattgcaaggctatagtaaccaaagcagcaggatatttggcataaaaacagacacacagcccaatggaacagaatagagacttgaaaataaatccatgtacttacaaccagctgattttcaacaaaggtgccaagaatatatgttgggaaaaggatggtctcttcaacaaccagtgctaggaaaactggatatccatatgcagggagcgaacctggacccctatctcccaccatatgcaaaagtaaagtcaagatggattaaagaactaaacataagcccccaaactacaaaactactagaagaaaacacagaagcaacacttcaggacattggtctacgtaaagatgttacagctaagacctcaaaaccacaggcaacaaaacaaaaatagacaaataaaattatcttaaactaaaaagcttctccaaagcaaaggaaacaatcaacagagtgaagagacaatttgttgaataagagaaaatattttcaaactatttatctgagaagggacattataatatccagaatacacaaggaattcaaatgtctcaacagtcaaaaaacaaataatcccattaaaaataaagcaaaggacataaatagacatttcttaaaagaagacatacaaatggtcaacaggtatatgaaaaaatgttcactatcactgttcatcagagagtgcaagtgaaaactacagtgagatatcatcttaccccagttaaatggttattactaaaaagacaaaaattaacagatgctgcaaggacatggagaaaaaggaactcttacataccactggtgggaatgtaaattagtatagcaactatggaaaacagtatggcaatttctccaaaaactaaaaataaaackaccatgtaatccagtaatcccaatagtggttatttatccaaagaaaaggaaatcagcctgttcagaaagataactacaccctcatgtttattgcaggactattcacaataccaaagatatggtggactcaaactaagtgttcatcaacagacaaataaagaaaatatgaaaatacacacaacggaatattattcagtgataaaaaagactaaaactatgtcatttgcaggaaaatgactggaactggaggtcatcataagtgaaataagccagaaagacaaatatcacatattctcagttatacataggtgctagtaaatgtaggtgctagtatatgtaggtgctagttatatgtaggtgctagtaaagtgagtctcattgaggtagagcgtagaatgatagatgccagagtatgggaatgtgggtaggtagggacggaaagggatcaagagagattgcttaatgggtacaaatatacagctaaatagaaggaatacattctaatgtttggtagcagagtcaagtgactacagttaacaacatcttgtatatttccaaatagtcagaagagaggtcttgaaatggccccaacacacagaaatgataaatacattgagtagatgaataccctaaacacatcaacttgaacattacacataccatgcatgtaacaaaatatcacatgtaccccrtaagtatgtaaacatattgtgtataaagaaaaataaaggtatacagattggtagtaagaaataaaactttctgatctcagatgacagggttcctatgtagaaaatcagaaagaatcaacaacaaaaatatttgaaactaataagtgattatagcaacattacaagaagcaaggttaatatacaaaatcaattgcttccctatgtaccagcaatgaataagtagaatttgaaatcaaaaacacaatgccatttacattggcactccaaaaaattaaatacttaggtataaatctgacaaaatacatactagatctgtattaaaaaaaactacaaaactctaatgaaagaaataaaagaactaagtagatggagacatgttccgtgttcattgataggaagactcaatatagtcaagatgtcagttctttacaacttcacatatagattcaatgcaatcctaatccaaatacaagcaagttattttacagttattaaaaagttgatttaaaattttagagagaggcaaaagacccagaatagtacctgcactcctatgtttattatagtactatttgcaacagcaaagatgtggaatcaatgtaagygcccatcaatgaatgattagattttctaaaatacagtatgtgtgtatatatgtgtatgtgtgtgtgtatgtatgtatgcatgtatatatgatggaaaattcagacaaaaaaagtaaaaccatgccttgtgcaacaacatggatgaaactgaaggccattatcataagtgaaatggctcagaaacaaagtcaaatactgcatgttctgacatataagtaggagctaaataacgtgtacaccattatcataagtgaaatggctcagaaacaaagtcaaatactgcatgttctgacataaaagtaggagctaaataacgtgtacaccattatcataagtgaaatgkctcagaaacaaagtcaaatactgcatgttctgacatataagtaggagctaaataacgtgtacaccattatcataagtgaaatggctcagaaacaaagtcaaatactgcatgttctgacatataagtaggagctaaataacgtgtacacatggacacacraagtggaataagaaacagtggagacttggaagtgtgagagggtgggaggtggatgaaggataagaaattacttaatgggtacaatgcacactattggrgtgaaggctacactaaaagtccaaattttacaactatacaatatatccatttaacaaagctacacttgtacccttctaaacctataaaaatttaaaaagaaaaaaatattgaaggtgaacaaagttgaaggattgacactarcagactttgagacttaactataaaactacaggaatgaagacagtgtagtagtggtgaaagaacggagaaactgattaatggaaaagaatagagaacccagaaatagacatacataaccatagtcaaccgatttttgacaaagcagcaaaggcaayacaatgaagaaaaatgtcttttcaacaaatggtgctggaacaactgaacatccacatgcaaataattgaatctaggcacggatcttatatccttcacaaaaactaactcaaaatgggtcataagcttaaatgtatattaaaaaactttaaaaccttacttattaggtaaaaggactaaatctatgcaaccttggatatggtcataattttttagatacaatgccaaaggcatgatccatgaaagaaataattgataagctggactttattaaaattataaacttctgctctgcaaaagacaatgtcaggagaataagaagacgaaccacagactgggagaaaatacttgcaaaagatacatatgataatggattgttgtcaaaatatacaaatagctctcaaaactcaaaaataagaaaacaaacaacactttttaaaaagagccaggaccttaacaaatacttcacctcaccaaagaagacatacagatggtaaataagcataggaaaagatgttgcacatcttatgtcactagggaaatgcaaattaaaacaagataccacttcacacctattagagtggccaaaatccagaacactgacaacagcaaatgataataacaatttggaacaacagtaacttttttttttttttttttttttgagacggagtcttgctctatcgcccaggctggagtgcaatggtgcaatctcggctcactgcaaactctgcctcccgggttcatgccattctcctgcctcagcctcctgtgcagctgggactacaggcacccgccaccacatccggcttattttttgtgtttttagtagagatggggtttcaccatgttagccaggatggtctcgatctcctgacctcgtgatccgcccgcctcagcctcccaaagtgctgggattacaggtgtgagccaccgcgcctggcccagtaactttcattcttygctggtgagaatgccaaatgggacagccactttggaagacaggttggcagtttctcataaagataaacatacttttaccatatgatcagcaatcgcactccttggtatccacccaaaggaggtgaagtcttacatccacaaaaaaacctgcacacagatgttaatagcagcttttttcrtaactgccaaacttggaagcaagcaagatttctttaggtaggtgaacagataaactgtgatacattcacacaatagaattcagtgctaaaaagaaatggctatcaagtcatgaaaagacactgagaaaccttaaatgcatattatgaagtgaaagaagccaatctgaaaagattacatactgtatggttccaactatacgatatcctggataaggcaaaacttacggagatagtgaaaagatcaatggtcgccaagcgttaggggtggggaaggaatgaatagcagcagcatggagaatttttacagaactgaaaatgctctgtgtgatgatgtatcataatgttcgatataaaatggcagatacgtgtcattatacatttgtctaaacccataaaatgtacaataccaagagtgaaccctaatataatataatctatggactttgggtgataatgatgtgtcaatggagtctccattgaactaatggagtctccattaattgaactaatgaagtctccctggatttggaggagaaagattcattgattgtaacaaatgtgctcttctactgggggatgttgatagtgtggaaggctgtgtatgtgtggtggcagagattatatgggaactctctgtaccttcctctcaatttttcagtgaacttgaaatttctatttagaagtagactctttaaagtcattataagaaaaagatacttgcacacgcatgtttatagcagcacaatttacaattgcaaaaatatggaaccagccctaatgcccattaatcaacgagtggataaaraaattttggcgtatatataatcaaaatttctcaatactatgtgtnnnnnnnnnnnnnnnnnnnnacacacacacacacacatatacattatcatacacatacacaccgtggactaccactggccataaaaaggaattttgcagtgaactaatggcatttgcggcaacctggatggaactgtagaccattattctaagtgaagtaattcaggaatggaaaaccaaacattttatgttctcactcataagtgggagctaagctttgaggatgcaaaggcataagaatgatacaatggactttggggacttgcagggaaagggagggtgaggaataaaagactaccaattgggtacagtgtatactgctcaggtgatgggtgcaccaaaatctcagaaatcaccactaaagaactgattcttggaggctgagatgggcagatcactggaggtcaggagttcgagaccagcctgggcaacatgatgagaccctatctcgactaaaaacacaaaaattagctgggtgtgattgtgcatgcctgtaatcccagctactcaggaggctgaggcaggagaatcacttaaacctaagaggcagaggttacagtgaaccaagattgtgccactgcactccagcctgggtgaagaatgagactccaactcaaaaaaaaaaaaaaaaaaaaaaaaagaacttatttatgtaaccaaataccacctgttccccaaaaacctatggaaataaaaaataamaatagtcttaarattaaaaaaaagaatgatgcatagcaatgtgtttaatagccatttatatccacaaataaattaatcaacagtgttcataagttcttgaatatgcaaagaattgctctgaaacatgcaagaagcataaagcaggttaccattagagagaactgagcagctgagagacagggtrcacgtgagactcaccatcttccacataccattttctactatttaagtgtcataccacatacaaaacactaaatgcccattgatctttgacaaagtggcaaaggcaatacaatggagaaaaaatgtcttttcaacaaatgtgctggaacaactgaacatccacatgcaaaaaattgaatctaggcacagatcttatatcctccacaaaaattaactcaaaatagaccaagagcctaaatgtagaatgaaaaactataaaactcctagaaggaaacaggataaaacctatatgaccttggaaacgatctttatttgaaacactaaatgtccattgatttccaatacccagagtgatatttatttgtgggatgcttagttgcctgtgccagaatcggccatttgattcctaactcctctgcaaggaatccactccagtggagccttttaccataccttgtttgcttctcaactcaagcctttcttcatgcttcctgccaactctctgcctacccatgcaccttgacatcctgccaggccttcaataccaggtgcagacacaacctccctggggctttccctgtccattacccccaggatcccactgtttcttgatccacagtcccttcctggcttgtttcctgctgccattctcaagttttcagctaaaatacacatgcctaaattgcatagaccaattgctgtgttcttaatgttgctgtttgatgtgttgaaactttatcatcactatgaaaatatcaagagaaagtatccttgggaggtgatgagatcatgagggctcatgaatgggattaatgcccttataaaagaggcttgtctcccttaccctgctgccatgtgggacacatagaaggagccatctatgaagtccaggccctcaccaggcactgaatgtgctgatgccttaattttggacttccaaacctccagagctgtgagcaataaatttctgtagtttataaattacctggtctaaggtattttgttatggcagctggaatggactaagacactggtcatacacatctctgtaattctacggtgactttctttttgttgttgtttttgagacagtgtctctctctctgtcacccaggctagagggcagtagtgccatctcaactcactgcaacctccacctcctgggctcaagcaattctcctgcctcaacctgccaagtagttgggattacaggcttacaccaccatgcccagttaatttttttttttgagaccgagtttcactcttgttgcccaggctggagtccaatggtacaatctcagctcactgcaacctctgcctccccagtgcaagcgattctcctgctttagcctcccaagtagctgggattacaggcacacaccaccacatctggttaattttgtattttttgtagagatggggtttctccatgttggtcaggctggtcwcaaactcccgacctcaggtgatctgcccaccttggcctcccaaagtgctcggattacaggtgtgagccaccatgtccagcctctatggtgacttaaaagtatcaagtgctcagtgaaagagaggatattgatgatttacttctcctgccttcattggtcagctcactcatctgatarcctttgggatctggtgtaaattcataccccatagggaactatagggccactcctgctgtgctgagcagagggctggctgggcagggccacctggcctttgagactgcctggtagtctgactctcattgcccgggcccatctcatcygtgctcgcttgccaggaatcccgagggtcctagaatcccagactctacatcctacaagagttggaaattactctttctgctgaatttactctgcaacctagttgcaccacactttcagcctgaaggacacaagggaattcagggagaatgcaagagaaaagaatacatgccagcaatataaccagatctgacaggttagtttaaaaaacaaaatgcaattctgtctggatcagagtgtgtgaatatggcagggtctagaggctgggggctcaggcctggcagaggccagttaggcaggatgccttttccttccttaatcaccactccctcacccacaaacagggcagccaaaaattttaggcaagaatcagactagaggcagaattagaaagtgtcagtaaaatagcagtaggtggtgttgggatgccgacagaccctcactggctcctccagaccacctcacgggaagaaccgaggggggctgaagtctctgtaccctctcctcttctcaagcccccctttcccaggttggggagggtgaaattatttatttggggggtgggttcttttttcttttttccctgcccctcatttgatctcttttggtgcagtgctgctgttaacaaaaaatacagcatgtttgagacaaagtatgcacaattcctcttccagaaaggaggcctttgaagaaaaggcgagtgatcagaataaagagagggagcgggggtggggagggggcgggaggtgagtggggagcccaggctaggaggrcaggctttgatctccccacacaggcctgtgccttttgcgttttatttcactgttgggatgaggggagctttttgcaagggcgtgatgtaaatgcttaaggaarggaggcakggtgcaagctctcaaaactacagatgcagacacaggtgccagggatgcctcctgtctgctcccatggggcatcacccagagcaggttaktaaagggctgccctgggaggaacctcttcccgtgtccacccctccttcctcaaacatccatgctttcacattcctaccacattcactcacactatctcacttacagtcatacacacacagtcatcattcacacacacacacacagaattcacactcacatgttatcacacgcagttatcatgcaccctcagaattcagccacacactagctcacacataatctcacagtcgtacwtacattcagaattcacactcacacacactaacaggcacacactcagaattcacacacactaactcacagtcatacacagtcagaattcactcacagtctcacacatacacactcaccattaacctacacacactatctcacactcatacacactcaattcacacaccactgtatctcacagtcgtacacatattcgacrttcacactcacacacactgtcaaacacacactcagaattcatacttacacattatctcagtcatacacactaacacactcaacatttacaatctcacactctgaattcacactccaaattcacactcagccatasacactyatcattcayactcagtctcacacacaggcatacacatacccaacattcacatttagtctcacagtcatatatgcacaccattcacacacactaycttgatagacatacacactcagaattcacattcatacacattatgtcagtaatacacacacatgttcacatcccttgcacactattacctcatactcagtcatacccatgtacccattcacacattcacacacactcacattatctcagttattcacacactcgtaagttcacttgcccactcatcccatctcacacacactcaccctaacacacagttctacacacacacrtttacagacccccacactcatccacactctctcacacacacacaatctcacatccatactcacatattcatacccacacacactatctgacatatgtttgcacacacactacccacattcacacactaacatacacatgcacgggggatcagttctgacaaggttgtctgcaacacaatcaacaggggcttccatatgactccttcactagggtctctggcatgttcctccttccaactcccaggaccctgccccgcagcatccctgcccagcctgcccatttcctgtaggccctaagcctccattcaggtcaagtttcctcactgcccctgctctggagcttctccccacctccccttacaygcctgcccacagctggctacaataataccctaagccgaggcagtaacagctaataacagcttcacaagcagaagatcttggtgagatcttaactcaaagtgagacaggccttagtgccttggattgcagccacagtggtggagcaccaggcctcaggagcagagtgatgccgagatggctgcaggaagaggaatgtgggcgagtttctgcctttcaaatcatgtcaagcattccatcagtcatgaccttggccatggaagggtgactccactggacgcccccttgggaattttcagacttgtgaaagaaggatcccaaccaccagacctaggagggatctcatccatgctcgctccaccagaagaggttgcaggttgtgcccagaagatctcttacctccmgagactccacacaacagaaagcattcccttgaccccctaacctttcagagaataagtatttgctaagatgctgcatgtactagggcagagccaggcatacagaccactttgcattctcctgttggacttcaaactatgctggataggtagtacatgtcctcagcacatggggcatgcaagaccaaaaaataatactctcccatcctttagctgtaactgtctcacacagaccaaacttagaccaacagggctctgtgcccccatccagttagcactaccggactgctcttaggacagtgccttgtctttggcctgccaagttctaggtcaccctctctcccctgstctcatcctgcatagacagcctttgagtcacatttactctttccttcccatccttaagaagactcagcccttgtcctcgggatgcctcagggtagaaaataaagcagagtggatayggactccagcttcaccccccaccacacttactagcccttggcaagttaatcgcctgccgccacgctcagttttatttactgtaaagtgagcgtgtaactctcaaatttagaactccagcacataccttycccttgaatggtagaaggctatatccagtgctacttgacatctctgcttgaatatcaagtaggagtctcaaacttagcaggttgaagctcaacttctgatttcccactccaaaccaggcctctcctggtctccctgtctgagtgaacatcagctccatcctcctgcttgctcaagccacagttctcagatttgtccttcctgcccaataacccagtctcccaggattatcttcaaaatgtatcaaggaaactactacttcccamctaaatctccaccaccttgctccaagctaccaactcctctactgcatcagctcctggcttatctctaagcttccctagctcccagtgtacagctgcaggaaggttgtggagtgatcctactataatgtaagtcatttgcacccctcaaatcctgtaaagggtctccgtctcactcaaagtaaaagccaaaacattccctggagcctacaaggcctcacaggctctgccctcacagtttggctcccattcaagcctcatctcactggtcctctctgcccagactacaccagcctaactctattctttgaactgaccacgcaccctccagattcaagccctttgcctttgtagtaccgtctacctgcaaagcctttaccccagatatacatgtgaggacacatccctcacctgctccatgactttgctcaaatgttaccttctcagcgagaacttctctaaccccagccctggcacttcctctctgacctccctatttcatctttctccatggtccttattgccatctagcctattatcttccttttacttatttatttattgtctgtctccctttgcttgcactgatccttatgagggcacagtgtttagtttcagacagatccccagagatgagaacagttcccaacacggagcacacagtaagcctttgttgaatgaattgttgaaggaatgcatgaatgtgtagggggtgaatgagtgatattgattaaatactccctaggtatcaggcattgtkaaagkgytttccaggtattaaccccttctatcttcaccctgactgagaggcaggcgtttttgtgatccccatgacataagagcaggagcctgtcatgacttgctgggaagaacaaatgaggtcatgtatccaaagtacaaggttctcagtaagctctcaataaatgctgacaattgctactatgatcaacatcatccaagtcatccacacccctgtactgagcccttccctcawggccatcactgttctgggcatgaggggttgacgctggggttggttggagaagaagcaaggcctacttgaaaagggcccccaaatcagctcaggtgagggcctctaactctgggaggagcataccccacaccacttcaggygcttgagacagttgctctgtgcccagatagatgggcaagcattcagsctaagtccccagtgggatggacaaacccaccagcacaggcctaggggagcaggccactttgaagctgtcgagatggggaggatcctgtatgtttgtgtgagctaaccggcccttccactaaccccgcccctgtcagcctcccctcctcgtgtgactccagaggaagagtcccttgccctggcctggcctctggttcctcacctgaaaaggtgaaggggattgtaccgcagcatcccaactrtctccttcagcaccgastggctgtctgactcctccggtcagaggtaccagaataggctaaatatccccagcrgctgccatcccagcgggtgggatgasagcgagcctgagctctgctcccttgatctcctctgcgtctctgctggatggcaggggtgagytggagcttccctggaggctgccacatgctggactcccccaaagtgctgactcctgagcctctctgctcgttttctatgcattgaacttcaaacaccagagaggcactcaggcagcaagacgggtggatttggccattatgttctcgctctcctttttcccttcatctccctcaagacaggattatgggttgcacctattaattcttgtctggaagcagcaagccaaccttttctctttgtggagttttataaccttctctgctgcaatggaggaggctacgagccattcctctcacccaagcagcatctggcagaaggagtgtcctctgagttaactagctaaggacacagctgtatgaggcaccaggccttctccccaaggagaggaggggaaggtgtgtgtgtctggcatataggagcctccaaagggaagacacctggaaatctcccttccttgatctgtttcccaaggacaaacacagaaatcaaaataaaactgtgtccagtgaactcatttattcattcatctgcttttgacgaagtgcctcctaagtgccaggcactgtgctaggctccagggtacagagataaacttcacagcctggaagcatataattggacaacaatcagtgaaattagcacttttaatgctctgatagtggaaagcacagagracaccaagctctgttcggagagtggggcaggaagggccagtttctgccagtcttgggggagaaggatagtggcgacagtaccacaccctgctcagagccaaggaatgctgataaacagaagctatgcctgcctgggtggactttggaaggttaagtagagggaataaaatatacacaggttaggccacttaaaagacaaagtacatttctccaatcacatgtatttccatatggccaaaaagaaccgtttctwtggggaagaagtgagagatgatcaaagagaggagtgggaccttgcacatcatgctaaggagtctgsattttctcccagagagcctgggatgccaccgaaagatatgatgtaagggtgtgacatgatcaggtttgtgctttagaaagaggactccsattgcaaggaggagagatggaattgtggttgggaagtcatccaagactgaggatgagagaagaatccatgcagacggttgttacagtaatgatgggtgccgggggtagggggtggtctgggagtggagcatgtttagaaggtggaatttgcaggtcttggaaatgattccatgatagaggtaagaggaagggaagataaaagaaaaggagggggtaatcctcaattactcattttggtgactgggtggatgacaatgacatttgctgaataaaaatattcagtgtgagaagcagatttgcaagggagaaatgacaggctcactttcagagcggttgagtctccagtgcttgcgagctgcaaaagagaggaagctgagaaagcagctccaggaagtggctccacagcacaggagcgaggcctggcagggacagcctgacatgtggttggcaggggccacccaaagccctaggggtagatgcaatctcccttagaactttcgtagagtagaaagagaagcaggcaaggattcaagcaggaaatatccataatgaattagaaagatattagaaaggtccacaactggaccacaactttcttaagagcaaggactgagcctgggaccctcatttaaatagccacgttcctggatcagagagtgctggagtcatagcttaatgacaatacagggtctaagaatacatttaatagagaaaaagagaagagagaaatcctttctaattaattatggccatttcctgcgtaaatccttgtgggccccccacaggagagttaaacacctccaagtccaaaaagaaagactcagtcatggggctgtgcctgtactggctacctggcttctggaagctcttaggagggaaatgttcatcagatgggttcttttggggcctctgcagtcatcatcgtcctctcagcagagctactgcaggctcattgctaccccagggttccatgaccaaatgtgatgcaggctatcttagacagagcctccatttacttcccatgttaggagtaggcagtgctccagtgctgagaaatgaacacttccttttacctgacagcatccccgtgacccagacctgctctccagttcacctttgtatcctgcctagatcyctgtaccaagttcctgttctgatacactatcttttccttgtgtgtttcttaggattccagttagcctttgcatgccactcagtcctagccctgggggagaagactagtggctagggtgccacactctgcaagcaactcaggagggtatttgaggctgactgcctgcaggttggttatctgggtttcatccctcctggaagtgtgttcctaagcttcatccttttgcgagaatgccttgatgcagtctgcacactggcttgccggtgaggttgaaaccstgttcccaccaacagaatccaggggccagtggccaggcttttttctgtctgccccaattgtaattaatctgtcccacctctgccctggctccaatacttggctatgatattagatatccatctgcctctcatgcctacagacttttgcctctgtccatccagagctgaccagttcccactgcactttcttgatacacagcagtcacttaataaggctgcttggtggcaatgaaggatacaatggggggccagtgaccttgctgagggactggctcagttggaggcaggaccatgaaactgggctttcctgctccactttctttctyccttgattcctgccttctgccaatcctcttaaaacagcaaaaaccctattctttcttctctttttctctaataaatgtgttcttagacacaataaatgggttcttagaactcttaaggttcttaaacaaccttaacgttgttattaagttgtgactcgagcactctctgatccaggaacgtggctacttaagtgaggatcctggctcagtccttcctctagagaaagttgtggtccagttgggagaagggttcccaggtcacccaagcagtcggcagaagagccaatgcctgtctctaagccgtgtatgttcagctccctcactgaagacctctcaagggaaggaaagccaacagccattcatcgagcatttattgtgagtaccagaccctgcacaggagtttgaactaggagtggctctcagttaatcttcatcacaagtttacgaagtccaaacgcccatttcacaggtgaggaaagagcatgagaagagacgaagacacaggaaatggggatggggacatggggaatagtaacagcttagtctggcaagtgttagtggggtagccctggatcttgggaacatgcctccctcttttgtccttgactttctcatctgagtatgagagagctggacttaatgacctctgagttctattccagttctttttcactctcagagtaatgcatgatccccaggaaagtcccctccactggaggaggatgtccaaaacattcctgttggaccacagttctctctggggaagcaacctgggcttcactttcccgtggctgcccagtctcacccacaacatggcagcaccaagattttaagacagggtcctgtgggacttgcaacaaagcaccagatgagagattcagcctgcatacatcctaggagatttgcctgggctgcatgctccaggttttgggctaggacaggggagaaggtgaaactaagggcgggtttggaaggaggagtcaaaccacaaagaaaatcctacaggctttcttctgggaatgttctctgtrgtctgggagtacaggcagttctagagtcttcccaagagaaaacatacttgttatccccctttcaagaaagcaaagacatgcaccttcagaattcacagatcttgttgtctttttgccccccagtggaatccaggcgatcccctgcgatgattctcaagctctaatttgagcagctggacctcttgaactctggtakgtggaagtggagctgcttgccagcctttagagaagggtgcagcagagattcgccctccctcagttcacacccactttgttccagggtggggcgtccattgcaaacgacaaaaccaacaagacaaaatacaatcacgggcagtacamctcaactcgctcaaacaaccaggaattttacaatctcacagcatggaaaatccaaagacaggtggctctgttgacttcacgtyctcacaggatgaggctgttctttgttttgtttctgatgctctgccacattcagaatgttcaagatgagggtawcttctccaggtctctcccatcggggtcacaagacagctgccattcactgagaaagacatggagtcgttcattcttgccatctttttaaaaaacagaacttccccgggagctctccaacccctgcagccctcatcggcccgggatgcttgacacacacaagttatgccttgccaaaacccatcgtctgcactcaggacagggtayggctgtgcagccctgaatgagataactaagtggagaatggtggatgtctraactcagtgcaggctcagttaggaaagkagaaggctttcctgcccaggrtctggtactcacaataaatgctcgatgaatggctgttggctytccttcccttgagaggtcttcagtgagggagaygaacatacgtggcttagaggcaggaaagggtgtgaattgcacagacaaatggcatcatgcgctaaagagggcccagcttccctaggcccggcggacttggcttctcacctggctctccaactaactggtgctcatctgcktggctytccaccaaccaattgccttttttctctttcatccagccagccycgggacaaaatccaaatgttggtcaaagtcctttttctcccaggtagggagactgtgagcctgggctccagccasagaggatgtgctgctgtccagggcccacaggaaggctscacggttcatgcatcctggkgtccccatgagaatgcatctcattgcccaggtgctcaaggctgccaggctggaggagtgcacatgatggtgaagacgaccttggtcactggagctttccacatgtggacactatgcatatagtatcatgcgttcctccattctagctgtgtgactttgggcaagtaactgagtatctccactacctcaatttccttataaatatatataatgtgtgtatatatatatgtgtgtgtatgtgtgwataatttatgtaactatgyatataatagtagcaacctcataggagcatgtaagaattatctgggttcctacatgtaaaactgtcagcacagagtaagttctcaagaaatgggagctcgtcaccatcaccgcccttgtcatcaacatcatcacggttatacagaagacattcatcacagtctcacgatgccaaagcaggctgccttcaagtgaagagtctagaatggcagactcccagtaagcttcaccaccgaggcctcagacactgctgacctcctggggatagaggggatggactcaggctctgaccctccttgccccagaagctccaatggtgggaggaggaacacccctggagctgataaactgggtgactcctcagagccttgcwtcttgtgggctcatgacgtcaatcatgctgccccacccacagcccttcctccctccccacacstgacatgcgtacagacactcctcatgaccctcccttctgccctttgcacccttccattgctctaccctctcacgaggctgactgtcggtagctgcgctggaagcaaccacagggcaagggaggcatctctaggctatttgcctccagctccaggagcagccctggaaagacaagcgagggggtgagagtgggggagagctgattctttgtacttcctcacacaggaacatcaggaagcccatatggtgctaccgtctggctgagtttaggggcgggagagctgggaggacagcgcaatgccccctgcagtggctcggaaggaagaagtcagtgatgtgtgcgggtttgataggatggcgccatgtgtgttcaacacacagtctggggccacggccggcacattctcccttaaaaataccctgcttagctaaattacctctgctttctgaaaatgcagctcctccagctggactttctctctgtccctccctctctgcacactcgtctaccctgcgttctccgtactcttccctctgtttccacacacatccatcctccttcccttttccctccgtgtctggctttccctccctctgggcaatcccacattttctctcccagacacctccccttgctctccgtggggcctcttctccctagtgaagctcctgtcagccstgctatctgggttcactccagcccagcccagcctagctcaggcctactggacccagcccccactgccctcttcaactccccaccctggggtcttccctctagaaatcaggttcaccagcatcgcatagcccattgactgccaccaaacgctcagtggaaggagtgattgataagaggcgctgcacagggaggtgagggcaacaaggctcagctctgagyccagaggccccctcccctctgcaggatgtgaacggagccaggcagagagcagacgcgcggacatgcgcataggcattgcggcaaggaggctggaaaaaatggggagggggcacccataataccacacgggagccccagaggagaggacggctcctggggtgcatgagagcaacctgctcacaaggacaarwacccggaacagggaaccagcctggcaggtgaagaggctatgagcggtgatggttctggcccgacaacagtggtggtagcagtgagaaggtagggagagcacaggccaaggggagataaatagcccaggtgttagattgagggtgacatcagtgggcagaggaggcatggccacattttccagtccaggattgggaggaagcacctgtgagcttgatatttttagcatttaagacttgaatacgttaaattcagagcaaaatggtcaagtcagccacatgtgcccttagcaacctcctgtccatcttctgcagcttcagccttgccctgagggaagtgtgggtcatatcacctgggagaggggaatacaaggagccttaaagggcccccagtcctgcaagacaaaagagctatatgccatccactgcaggaacaggaacttaagagaaaatggcatcttccagggaagtcacaagggctacaaaagcagagtcctgttgcaggagagggtagccagccagccctggggaccatgactaggaaacagttttatttttctaacaaatgtccctccacacttctctctcagagccccgactctctcactgggcagcagcttcctgaatggcatcttggcctaattccatcacctaccagccactttcatttattagaacagtatcacagtggtccttaagacttggtcttgttcattttaaaacttcaatctcaaactcagatcaaagctcccctcctgtggctatagcagcctggtgtgtgtgtgtgtgtgtgtgtgtstgtgtgtgtgtgtgtgtgtgtgtgtgtgtgtgtgtgtgttagggatgaagaggattgtgttgctagattttgcaaataaaaatatagggtgcctggtgaaatttgaatttctgatgaatattgaatattgaatgaaaatatccaaatgcatttttagggtatttcctaggcaatatttaggacatatttatgctgaaacatattcattgttatctgaaattcaccttgaactgggcatcctgtattttacccggggaccctggggtgagactccagggcatccctggacatccctgcctgttctcagccccagggatggcctcagcagagacacacccagctggcaggcatccttcaggggctgcccttgagtctccggctatcacccacctccctctgtgcagcgggcatcaccatgccagctcccagggggtacacactgtggtgccgtggacccagctccactgccccattyccccagggggmggcttcagttctgctcaagctctgccatcccctctcacctcctgctgccaaatctctgctgctagatctctgctgctgaccccacctgtctagggtggggaactccagagactccatcatccttatcagttggggaaaccacaggccatctctctctcatgctgtttctgcctgtttgtgtcacaaagggacagatcagccagcctgcaggataggcagacactggctgggcacacaatgcctgtcttgcctcttcgtagaaaccctggtctatatgagtgactctctcacagcttccctctctcatcatagaggaaaaaaatcattttcctcttccccagtcaacttcccttctcaccgtcttccccttgcatgaactagggaggcagaggtgggcacagtggaggcatcagttccagctccacggtaagccctgcgcgattctgctggcccagctgcagggactccctgcacctagaaggtggggaacttagtgttctctgtgctgagatttgggccttagtccccattcccggacagcaggagaatcccacttgacatcttgttgccatcaatgtcattcctgtctaaagccaggaagaggaaggaggtgtggctcacaggagaagttgcagggcagggggtcagagggtcagggctctggtggtcatcagctgtttgatggggaggaggatgctctccctttcagccctcagtgttaccttctgttagatgaaggactggcctgggttttctcttccagcacttgtcctgtgttactgtaattgcagaagtggggcaggaagagaaggccaaggggacccttctcagtcaggacatagaaattgaagggtcaaaaatcatatcctcacttccagtaaccatccttccctgagaagaggccatcattaccctctccacacatcatccttctaacttttgtgcacccaggaaatgggaacagagaggagtggggtcaaaggagagagagcagagggctgagcccccaggacgggtaggcagagaccaaagcgccttaagctgggggcagcagacttcaccccaccagcagagccgagcacctaatgtgtggtagacttttcacttatattctatgaagtaggaaaataatttgcaagctcctggttaatcctcaccattgccatgtgaggtgatattatccatttctacagcaaagaaactggtatgtgtttacctcaaagtgcatatcattttggttccaaggcacactttttcaccttttataacatttttttcctcctactccaycctttagggaagaaaccaggcattatttaatcaatgatctatattacagtgaggctccagactatctgcctgcctacaaagactgtgctatttcgatatcactatatggcattgccattgcctccatcagcacagagtaaaggtgaaggtaggtgtgccctctcaactcagggctcctcccaatcatggctcctgctgtgaactgaatgtctgtccctataaaattcatatgttgaaatcccagcccccaaggagatgttattaggagagagggcctttgggaggtcattaggccatgagggtggagccctcataaatgatattagtgtccttataaaaaagaccccagagagctcccttgccattttggccatatgaggactcaccaagaaggcactgactatgaagcagaaagtggatcttcatgagacatggaatctgccggtgccttcaccttggacttcccaaccttcagaactgtgagaaatacattcctattgtttgtaagccacccagtctatggcatgtgttataacagcataaaaagactaaacagctcctgagcagacagcctcagatgacccaggcctggcatttagccagcagccgccagaacttctccatcttttctttttaaagactagtgtttattctgatgggtggatatccatgctgagccaattgttaaatattgtcatcataatccatggccctaccatctgtgccaaggtctcaccagcaggttaatgcataaaatgagccctgttaagcacatggaactgtgctaggccctgatctgaaggctgaggagtccaagattaaagcaccagcttatcctggggctggagagggctcatttctcatagacggcaccttctgactgcttccgcacatgatagaagaggtcaacaggatccctgagttctcttttataagggctctaatcccattcctgagggttccaccttcaytacttgttacctcctaaagtctctacctctcaataacatcccattaaaaattaggtttcattataagaatattggaaagacataaacattcagggcatagcaataggaagctgatctgagaccaagtgcctcaatatgagatgatgcctccaagctcatttccatttctttagaataaataaaaaccaacaagcctttttcccccgagggcttgcaatgtactaggtgtttttaatacatttcatctaatttaatcatcaatattaactcagcatagattaagtgtccaataatgtaggagaatcagaggactgagaaaagtccagggcgtggattttgctgtcaaggaacacccagctgtaatgattcraaactagatgtgccttgcagaagtgagaaaaggcttggttttacaatcatacagacctgagctcacatctcagccttgccactcaccacctgagctcagacaagtcccaacttgagtctcagctaccctatctataaaaataaaacaaacaaaaaaaacagaaaaaaacaaaaaaacagaccctgagatctatcttggagggtggttgagggttgagtaaattaagatgcgttgaagtacctagcacagcatctcacatagcagatgtgtcatcatcattagctgggttgcagtttcttttcttttttttcttatatgaatttatttcatttgataggatttttatcycatctatgatgacaaatatttttcaayagccttttactgtatcttttaattaattttagagacagggtcttgctctgttgcccaggctggagtgcagtggtgtgatcatggctcactgcagcctcgacctcctggcctcaagcgatcctcccacctcagcctcccaagtagctaagacaaaaggtgcatgtgaccatgtctggctaattttttattgttttttttttctagaggcatgatctcactcttttgctcaagctggtcatgaactcctggactcaagtgattctcccacctcagactcccaaagctctgggatcacaggtgtgctgtatgtttttaaaataaacgttttattttagaatggttttagacttacaaaaatattggaaaaacaatacagaactcccatttactccacacccagtttcccctattattaaaatcttatagtccattaatcataactagtgaaccaatattgatacattattactaaccaaagtccaccattaattcagatttcattagtttttacstaatgtcctggtttttctggtattaccccatccaggacaccacattacacttaatcatcacatcttcttaggcctttcttgactgtgacaatttctcagactttcctcgtttttgatgttctgaacagttttgagaaatactggtcagatattttcaagaatgttcttcaactgamatttttctaatgttttcttcatgatcagagtgaggktatgagtttgggggtggaagatcacagctgaagagccattcttggcacaccctatcaagggtacacacaattgatgtgtgtaccttatccctctcagtgttgacctcgacgcaaggctgaggagtgtggtccaagtttctccactgtcaagctactctttttcctcctttgtcgttagccacatttcccccatttgcagaagacaggacttacccagatgaaacaaacagccaatagtgtaagataatacatktggaagtctaaagcaagcaataggaagccactaaattcaaggaggaaaagctggacagagttaatgggctctgacaaagccccactggggaaagatgccttaaactggggtagtcatggcaaggtcaatagtgtttggcgtggaggttgggaatggggaaagcaccctaggtaaggggaatggcaggcgcaaaggcaggagcatgaatgagcatgcgcgtcttgggccagtcggtggcggcgccacctcactgtggttggagaaagtgatctgggaatagtcaaggctgcgtggaggcactgtgtgattcagaaatatgaagacgcatcctcttaaggagtggtctccagcctttttggcaccaggaaccagttttgtgaaaggtgatttttccacagacagggtgggagtagagagggatggtttcaggatgattctagcatattacatttattgtgcattttatttcattatgactacattataatatattataatatataatgaaataatgacacaactggccataatgtaaaatcagtgggagccctgagcttgttttcctgcaactagacagtcccatcttggggtggggagacagtgacagatcatcaggcattcgattctcataaggaaygtgcagcctagatccctcacacgcacagttcgtaatagggttcgtgctcttatgagaatctaatgctgctgctgacctcacaggaggcggagctcaggcggtaatgccagcgatagggagcaactgtaaatacagatgaagcttcactcacatgcccgtggctcacctcttgctgtgcggcccwgttcctaacaggccacagacctgcacccacctcctgctgtgsagcccagttcctaacaggccacagacykgcacccacctcctgctgtggagcccagttcctaacaggccacagactggcaccactctgtggcctgaggattggggacccctgctcttaaatattctttgagcctattcattccacaagagagcagagctaaaactagattcaacaagcaggagaacaaagggagctgcaggactcagcccctctgcccacctccacaagagattctagcccagtccctctgcctagaccgcagccctacccaaagtcacaggaggctccttgtgccaagatcttgtagcggcaaagaaaggcaaagaggtcaagtccttgcacacccagccaactgcttcctcctatgcatgtacatgtttgtagttacagaggtctgtgccctcacccaatattccccatgggtttacagacatgttcacacgtgggtgcaagctgatctccattgtcagtacacagatgcccatgawtaatgccgtggatatacacatgtgtgttgcacaagctacacaagctaaagctggtaacccaaccctgaagaccctcacgagctgctgtgggggatcttggcaaccacccttccttgccagccaggtcctcactgytrgagcaggtaakcttattcatcttagtttcctacatcttcacctccatcagctgcttcgctaccctggatgggccaagcacggggactggactacagtgcaagctttttcgagggaagttgcagaagagaatgccagtaaataatctctgactggctcaaagtgctgataaccagtttatggggagaaaatgtgctgcttgtagtctccgggaactgagtttctagttcatttccatctgcgtgggaggggaatgcagggactactggagggtgggtgatgttggtttaaaaaaatgaaaatccatttctttttcctttgtcctgtggtccaacaaggcagagccttgcagtctacaaggagggggtgtgagtggcctctggctacatggcagggcagggagaagcaagaggacaggaccgaaggctccccactctgcaccaggatgggcacagcccaggatggaagggacttgctgaggccaggcacagccaagctttggagtcgcacagagggctgaattcaaaccctagctctttcactgctaccttgttgagcttgggcatcttaagtaatcactctcagcctgggagtctttcatacatggtaggcggtacagaagaatggttaagagcatcaatgctggagttacctgyctgggtttgattacaagctctgcctctttctcaactggttgtctggagaaagttgcacacctttcctgtgcttcatttttgtcatctggaaaatgcctcgttataaaattactcaataaatgttaactgtttatgaaacagtttacctgcaataaaaacaactttaagaaaaaaagggttgaaaacgatttactctcagaatatgggtactccaaggatcacctttctttaggagaggagggtcaacagtaaaatggttggcctagatgacctcatgaagttactcagtttgtccatgtgtttgaataatgracaccacttggtaaaagaaatgttctagacactttaattcacaccaccatcctgccacggtagtatgcattgagctttgagagatattgactcctgccttctagacactggccacttaagaaatagagccacagaaaatcacaatatcagccgtattaatggtcaggctgagttggacttggacctgggaccagaatggagtctcttgttagttcttcctatccaataaaactatgtcttccctgaagactcttggccagtctcttagggccccasagcagcaggcaaaggatccccagacatgtgcaagcagggagaccctgggcaggggaccaggtggctcattgcatgggaacaggggtcaaaaaaagasaatgggtttcwttattgagaaagctgaactcaaaagggggaggttggtcatacattgagcatcagtctttctcctaatctctctatccaggggaacagtaagtgtagacagaaaaatcaatggtatatttccaatcctgtatcctcctgagaaactatgcaagctgacagtcaatgtctgtcctaaaaacgtggctattctctgtcgacgatgtggagagtggtattcagagaggtcaaaggacttgtctaggaacatcagactggcagagctaatgttgaaacccaaccacaaatgccttgctcttctccttaccccactgcatgtcctggatcatgctgggtctgcatgctcatccggactctttccagcggtccctagctgctcatcagaatagcctgagtctcttcctcccaggcccaccggctgttgcttggcttgtctgcactccacactgtcaggaggcgacattcatagacagtgatgactaaccatcctaacaaatggtacagagagtaagtgctaraagcgttcaaaaatagcccagaaagccctgggcacacaccaaaagggcagaatgacactctgagtatttcaaagagggagacacaaggaatgccagtgctgagctggagtgaccctttcccacaccacaaggcttgcaggagctgctgaggccagtgtggagtgcagggccacagaagggccctctgcctgcctctgtgtgtgtgtgtgtgtgtgtrtgtgtgtgtgtgtaacaagcagcctttagcaggaagatgctgcccagatagaggccttcctggattcaaatacaatgaagggcctgaccctgcttgtgtctaagctcatgaaggaaatcctgctgctgtgagattggacagctatgtgatggtaaaagcaagggagtacagagggagagcaggcaaccaagggaacgaagtcaaggcaggaatgactaaagaggtgatccttgatttcaatccccttgatgggcaggggctcacagggcctttgtgcagctcagacaaccccagctgacagtggggtctccttcagagctgtgggtgtgccctggagtgcaggtgcagagacaagactccagagcagagaacagcccaagtgtgagagatctaagggaatcagaaaccaaaagtcaggtttaaggcagatagtggaaaccggagcaaaaccaaggagtggaaaagcccaggagagggaaatgggaagagctgttctaggaaaaaatctaaataaggcatacaattttttgttgcatagaactgtcctaggcattgcagccttgggccccacattgagagaaccaaagtcctctcacaaatttgccaactatcagtagtgcctcccctgaggatcaatgtctgatccatgggaattctgataacacaattaccatacttcaccacactgggttcaacaccactgtcaaagatagggccctggagctcgcattttccctaagaacgtagcctaatatatggggaatgtgctaggctcagctaattacactttggttttttatttattttttacagatgggatcttgctttgtacagtattgtgatcataactmtctgcagttttgaactcctggcctcaagcgattgttytgcctcaacctcccaactagatgagactacaggcacacaccaccaggcccagcctaactgcactttgatgctaactgactctccatattcataccttctagcttctccatccctcctgatcttgaacatgtaaacaatggcaggtggaaacgccctcctggctttcctgtgactaaaggttttcactgccactgctgctcaccatgctaggggcacctgcctcgctctttgagaaagaaacctgacatccagtgttcttcctcattcctgcctcttggatcctcgagatttcaaaggtgagaaatcttctctgagctctctataagcaggcttctgattaaaytggagaagttaggcgatgaacaccaatacaaagattttcatattttttattataaatagcccaaatatttggtcccatttccagtttaaatgggtaaaccataatattgatggttttcaacagatggaagatgaattgagcttctctaccagctagctgaaccacttttaatggggaatatatcgaagctataaattcctgcagacagtattgctatgcaatagcataatatatcttctattcaatcttttatacattatgttttgtcctgcattccagtggatatatttatggatcygaagctttgccatgaagaggcaccatgcacctcctcattcccatctctcaacatttccayggcctctggagatagtcctctcttgttcttgttctatgtaaaagacctggagtctgacccctttgtccccatgggtaagttttatctctgggaacgaagctttgtggccccaaacgtttctgggaycttagtgctcactgagaggyagagacgctatggaaaatgaatggatgcttgtaagtaggagagctgaccccttgccctctctcctgacacagcagttggggacctctggctctagacacatttttatatcacaggtagagaaggctagaatgctattgccacagtctatttttttggtggtggcggtttctcctatgagacaaatcaagacctagcagtagttcctataaactaagtctctctgtcaccagccccacccctcagaactggatgggaccaaaatgcggcagacagcacagtcagagggaagagcagctaactcaagccagagtcttggagacagcttratccaggtctgcctttgctacttcccagctgtgtgacatgggcgttatccaaaacctcagttctcttattcacaacaaggataacagtacttctagtggtgtgctggtaaatattcaatgcccctattgtgtttattgcctttgtttttactgtaatctatttcattgtaagtttatataattttatttttagtaacaggtttaacaagtgactcacagcatttctgaaatttaacggtcagctctcccgagctggccccagcacagactctgcatcccacagagtgtggctgtgaaggaccagtcactgagggctcacacgtatgcactaaggcctggcaaccttagcgacaatgagaataattttgtcaaccttaaaaatgatattatcaaccttaataataagagtggggagagggccargcatggtggctcacacctgtaatcccagcactttgggaggccgaggcagatgaatcacctgaggttgggagtttgagaccagtctgaccaacatggagaaatcccatctctactaaaaatacaaaattagtggggcgtggtggcacatgcctgtaatctcagctactagggaggctgaggcaggagaactgcttgaacctgggaggtggaggttgcagtaagctgagatcaagccattgcactctggcttgggcaacaagagtgaaactccatttcaaaaaaaaaaaaaagagagtggggagaaggggaagggagaaagagggggaagtgggtactgggagatgatttagaccactgtcagcactgagggaagccagtgacctcatccttttccagtcagaacatyaccgggtagcttcctcatttggcttccgcttaccgcactgggaattctccaaacgtcatacacagctattttcaaatgccagggcgaggcatacgtsccaatgctaaattgaagtgatgtttgtatttctcatcagtacctgatccactgttcccttctctctgcataaaacaggagttgactgtgagcagagctgcacaaccagcttcactgttcccaggtagaccccgagtgattacagactggatgamaaggacgaatgaatgaagcttttctcctctggtacagtgtgactggtatgaacacctaccttgtagggttgttgtgaggattaattgagataatccatgtaaagtgattagcccgatgaatgtttgctgttgctcttctccttgggcctgaggaaacctaatctaatggtataggtgtagggcagccattctgacatggtgattaggtgttctggcaagcttttatcttccctgcactgtgaacccgagagattccacctggccccctttctggacttcctattattttcactgtatttgttaacagaaataaaaattccctgacctagaaatttaaagagtcatgagtttcccacatgacattcataaaaagagactggatggctctccccacaaagaagtcaaccaatcctagaagcttcaggctcgccaaaaaatcagagatggtcattgactctccctcctcctccggtcctcctccttccctacacttctcctctcctcccctnnnnnnnnnnnnnnnnnnnncccaccttctttttctcttcctcctcctctcctcttccttattcccttcttctcctcctcctccttttcccctcctcctcctcctcctcctcttccttttcccctcctcttcccctcctcctctttctcttccttctccagagattaagaggaaaagcacaaggtctggagtcagaggccctggtctgacaacagctcagcaactcttggccaggggggctggagaaaccacctcagccctctgagcctcagtgccctcaattggaaaatgggaacagtcattcctaactcagagggctgctttaaggactgatttaaaagactttgtaaactgaaccctgctccacctgggttcatggctattgttagtgtagcaacctgtgtcttacaaagcagttcaaatccattatctcctctcaagtttatatccctaaaggaggtgcagaaaatggtggttttgaaggagttgcatggagctgctgggttggagcaaaagcttcactccgggctgaagcaggaagtacttgggaacaatagggtgaagccagcctaagagtttaggctccacagtgctggtaatgggatgcrtaggagattggagcagagcagtgacaggtaattgaatttgctgaatctcgtggagttgacttgttcttgtctccattccctcaagtaaagtcagccagttcttgkggtttaacaaccatctgtctctctcccacacagakgtaacaggatactggaagagacttttcctggtaccccagaattgacaaccagaacccctatctggcaacaaaaargcactgagaatgccatgttctaaagagagcctccacagaaagacaaataccgcacatcctgattcataagtgggarctaaataacgtgtacacacggatgcagagagtgggttgatggacgacagagactcaatcagaagggtgagggggtgaaggatggctgatgacaaattacttaataggtacagtgtatcttatycaggtgatggataccctaacaggagtgacttgacaactacacaatctacgcatgcaacaaaactgcacatgtacctcccataaaatgatacaaatacatatataaagmaagctttcaaagttagactcggaccctacttccacccagatgtagtgcaaggtggcagagtaggctctactgccaccagccactcccaaccccccgcgtcccttcccttcctccagtctctgtagggtaaccgtggctggagagagagtatctttggagctctcagttactgaggtgcacagttgtacagtagcctttttatcccctccagtgaggggttaggatccaaggggagcactggctgagactgactgtgattgtagacacagcacctgctgctgagacagcatagcacagatgtttccagcaaaaccgagggacgctagcctgtcgaggtccaaatcccagttctgctgccccaactgtgtaaccttgaccaagttactgaaccttcccatacttcattttcccatctgtaaaactgagataacagtagatacttcgtgtggttattgtgaggattacatgttgctatggactgaatatttgtatctccccagattaatatgttgaagccctaacacccaatgtaatggtaattagagaaaggcctttggagggtaattagggttacatgaggtctatttctgcttttaagctacccagcccatggtattccattacagcagcctgagcagacaaacacacatggatggtaattttgagcacagcctggcacatagtaagggcamtgtaaatgtttgctttgatctattagtactcaattccaggatggatgtttatttctgcaaagaacttgttaaactgctgcatcccctcctgagcagaagatacgatacttgcatggaagagaggagagccggaggasattggtagtggggcagctgacactccaacacagggcatgtcaagtaggtggcagctactatagacccaggagtgccctgagacacactgcattgccattgtcaaatacaccaaagggccactaggtgagaggacccaataacaggaagccatgggctggaaacccattcagggagctcaagtggggagcaagagaagcccctcagaattcccaacatgcacacctgtgccccacagggaacagtatctggactcctgcagagaagggcgcgatggccaggcagccactgccaacaacaggctcaattaattaagaaaatgtttgcctctttccctgtgcttccatgtccttatatttcaaccctgcaggagctaaaagaggaggaaacaaaaaattagagtgggcattcatcccccacccaaacataccctgcagcttcctcaatccacacgaaaagcctactgaagggtaaggaaaagaaatgaggttgatcttggatatgaaacttgaatttaactacaaccactagagtttagtttcgccttcatttttgtgacttcattttaattggcaatacagtcacctggtataagaggtacagaccagtggcagccagatgaacacagaggtccccatttggatgtggccaactccagcctgctgtggggacagggagggccttggtgtgtcacaggatccctaagcacaggaaacagaggctgtgtttccaggtgtgggctttcccattattggactgactgcatgaccacatcctttcagactaggatccctgacattggacccgtccaggcaggagctctgcaagccttctttatcagcagacaaggaaaggaaaatcatccaagagaggaagcaggagtccttcagacaatgagacagtgtccctcttttggtgggggaaacgcatccgtttttggattgactttccatcacagcctttcaaactaggcaccccttttctcaaacatggcctgctcaggaggcccctcctccaggtatgccccctgtctgctgctccagtgtctgctgctcagagatcccagcccagtggtcaggtggagactgagtgtgcctggtgggttggggtaacccagmtccctcatctccctctgcttacatcctcccttttcagatgcacccacactccagcaagagcaaacccatcctccgtgcctctgtttccctccctccatgctcctcttctctttatcccaacccttgggcctttataaggcagacttgggtgtggaaaagcagaatacacaggcatcctccaaggccagctctgacaagcacacctcctggtctacagaaggagcccctaagggaggaagggagaaatgtggaaggcaatttgagcatcttagacatagagcaagcagctggttcttactagggtgcttttggaaattgatggggtgtcttcagctgccataactgagaattgccaccaggctactggcatttggagggcagggccagatgtgacagatgctctgcagtgaggggacagtcctacacaacacagagcattaccccataccttgtatgatcttctaatgccatgcagacatttatgtaggaaccattgctgatctataaaaatagatgagctttctcatttttccactgggataatctaaactttgtcttagactactaactctattttactcaaggtcatgtttttgctatttcttatgctgtacaaaggtctgttcattcttatccaaatggtggttttcattttaggatttacccatatctgtgatctttcattttattttcctttttgtacataattccctctgatcagttcttaaatccaaacttattctcagtagaagtaagcatctgactacttcatgaggactcatagcatggtcattgccaagcatttatatatagaaataagtgccattttatatcagctttatagattccaatggtacaaaatatgaaagcgagtgtctctcctattctagtcccccagttttcttcccccaaagcactactgttagctgtttcttttgtgtctttctagagatatccttggcatttataggcagatagagagatatatggatagatgggtagatagatgatgcaaagacagatggatagatgaatgaatagagaaattcgtcgtgttttaagtggtaaccctatgttgcggtattttatggagatactcccatatcaatacctgaagccttccacatccctccaaatgcaaatagatcattccactatatggtgatcttgattatttaaccaggcccctattgtagatttgtgttacccatgatctttccttattgtatgcaatgatattaaataacttgatgcaaacaacattgtgtgtatgtgcaaacgcagttgcaggataaattcctagaagtggaatcagtgagtgaaagggcatgtgcatttacttttggtaaagagtgtatgaattaaatttccatgagcaatagttaggaatccccattacttaaaacctgcctgatactttgcatcctcaaacttttatttttgtcagtatcataggtatcttattataactttaatttgattttttcttctgatgctgtgagaatcagcatattttaatattgaggaatcatttgtatttccttttatgtgagctcttcatagctcttcytcatgttcaacttggacgactaaggtttgtttgtcttattggtgtttaggtacacattatgtgtgtgatatgtcacaagtattttcttctctgtcatgttttaatcttatttgttgtattttttccatgaagaaatttgttttatttgtacagccccattttctagtctttttttttttttcttaaggctactgggttttgtgtcaaactctaaaagatagttcccactctgagatgattaacaacaacaagagaaaattcccatttattcttttggtgtcttttttggtacacctctttgatacaytggaatttattttggagtaagaggtaattcacaaatcagacttaattgtcttctggataactacatagatattccaacattattaactgaagcatttattttatgcatttcaaatgtacctacagcaaaaaatagaggcatcatagcatagcagttaaaaacataaactctggatccgattgccagggttcaaatatcagatgagaatgccaagcacattccctatgtgtccactgtcattactgttgctcttattgcctgcagtctccccctctgcatttggtgctagtgttgatctttctactcatatgtcccacattcttctaattattgtagctttacaatggttatattttatgttatcatggtagtcactattataacctgtctctttcttccattatatactttaactggttgttcatgtatatgaaggcttctgacatctgaatattattttctaccagcttacttacgaaattctcttagagtttaaaactgttttaagcctttccagatataagtatatgcaaccagtgattactaataactttacctccttctttccaatatttatgccacctagccctttctcctatttaattacattgtcaaggacctcaagcaattaacatttttatcytagtcctgacttcagtgtgaaggtttttaagtgttacaccattatgcataatcctggtttgcgtatacagatatgttctatcaaattaagtaaacatctgtctattctactatattaacacttttatcatgaaatttgctttttctttttttgttgttttttgggttttggtttttgggtttttgttttgttttgttttgttttaagacagagtctggctgtgtcacccaggctggagtacagtgacacgatctcttcttgctgcaacttccgcctcctgggttcaagcaattctcctgcctcagcctccctagtagctgagattacaggcacacaccaacacacctggctaatttttgtatttttagtagagacagggtttcaccaagctggccaggctggtctcgaactcctgacctcaggtgatctgcccaccttggccttccaaaagtgctgggattataggcatgagccaccacacctggccacgaagtctgaattccatcccaaatgtttttcatagtactttgttctatttctatcattaaatgctgtgaattatattcattattccatactacaactaggttttgagtgtctattatatgcgaggtactcttctaaatgctagcaattcaagagtaaatacttcaaaattggtctgtgccctcacaaaacttactttttacccagggagactttcaatgttcaaagagttgtattatataatgtgaagtattatgtcagtgcaattatagtaacagaccacttaatattacattcctggatggtctaggtttttataacggaaaatgaccagaaagtttttggatctttccaaaatttgataaggggatcagaaagggaatttcaccaaacattcttaaagacaatgagtgaaaaagaaaaactgtctgcctcagtaagatcagacaattcaataaacagattacacagatttttgttcatggcattccattasaaatactgaacaaattgggattagggagtgcctaaatggttgtttcaaaagacatagtttctatgaaaacaaggataacatgcagtcatttgctggcaaagggctagaaaaggcagaatgaggacggagcccccagactgtctgtaccttcccctaggagatacgtcatccacatgctcaatgccctgtcttctactctacatttggcaaactctt

SEQ ID NO: 1592 - DNA, 13014 bp, Homo sapiens
acatgtgccatggtggtttgctgcacccatcaacctgtcatttacttaggtatttctcctaatgctatcactccccttgccccccaccccctgacaagccctggtgtgtgatgttcccctccctgtgcccatatgttcttattgttcagctcccacttataagtgagaacatgcagtgtttggttttctgttctgtgttagtttgctgaaaatgatttccagcttcatccatatccctgcaaaggacatgaacacattcttttttatggctgcatggtattccatggtatatatgtgccacattttctttatccagtctatcattgatgagcatttgggttggttccaagtctttgctgttgtgaatagtgctgcaataaacatacgtgtgcatgtgtctttatagtagaatgatttatagtcctttgggtataaacccagtaatgggattgctgagtcaaatggtatttctagttctatatctcagaggaatcgccacactgtcttacacaatggttgaactaattttcactcccacagtgtaaaaatsttcctatttctccacatcctctccagcatctgttctttactgactttttaatgatcgctattctaaacgggtgtgagatggtatctcattgtggttttgatttgcatttctctaatgaccagtgatgacgagctttctttcatgtttgttggtcgcataaatgtcttcttttgagaagtatctgttcatatcctttgccyacttttttatgaggttgtttgactttttcttgtaaatttgtttaagttccttgtagattgtggaattagccctttgtcagatggatagattgcaaaaatttcctcccattctgtaggttgcctgttcactctgatgatagtttcttttgctgtgcagaagctctttagtttaattagatcctatttgtcaattttggcttttgttgcaattgcttttggtggtttagtcatgaagtctttgcccatgcctatgtcctgaatggtattggctagcttttcwtctagggttttttatggttttaggttttacgtttacgtctktaatccatctcgagttattttttgtataaggtgtaaggaaggggcccagtttcagttttctgcatatgactagccagttttcccaacactattaaatagagaatccctgttgcttgtttttgtcaggtttgtcaaagatcagatggttgtagatgtgtagtgttatttctgaggcctctgtttatagaatccatttgaaagtgttctttcttcttcaatattttggaatcatttaagaagaactggtgtaagatcttttttaactttttttataatatgaaaaattataatatgaaaaaactataaatcgatcaggtcctgggctctttttattttttgatagggaacttattactgattcaatttcttcacttattggtctattcagattttctattttttaataatgcaatttttgtaggttttatgtgtctaagaatttatccatttcttctaggatattcagtttgttgtcatataattgcttataatagtctcttatgatcctttgtgtttctgtggtatcatttgtaatgtctcctttttcatrttttatctatttgaatattgtctcttttttcttagtttgtctacctaaagatttgtgtgtttatctttaaaaaaaacccaactctttgtttcattgaccttttacattattttttttctctattacatttacttgtgtttttttttcttattacttccttccttctacgaatgttttttttctggttccttgaggtgtagtgttaggctgtttattttagctctttctccttttctgatggaggcatttattgctgtaaacttctctcctagaactgtttttgatgtgtcccataggttttggtataatgtgtttccatttttgtttgtttcaaaaatttttaaacttttagttaatttcttcactggccctttgkctattcaagagmatgttgtttgtttaattctcatgtctctgtaaattctgcaaattttcttctggaattgactatctagttttataacattgtggtcccaaaagatattcgatagaatttcagtcttcttaaatttgcctagattatttctggggcctaatgtatagtctstcctgaaatatgtttcatttgctgttgagaagaaagtatattttgcagcytttggatgaaatgttattttaatgtctgttaagtcatttggtctagaatggactttagatcctttgttgcttttttatccagatgatctattaattgatgaaagtggggtattcaaactccttactattattgttttgcaatcatttctccccttagatttattaatatttgctttatatatttagatgctccaatgttgagtgcatatatttttataattattataacctcttggtgaattcaccccttaatcattatataaagatcttctttgtctctttctatagtttttgacatcaagcctgtgtttttctcatataagtatagctactcctactgtcttttgagttccattttcacaaaatattttgttttttttcctttaattttatccctttccttataggtgaagtgagtaacctatggtcagcattttgttgggtcttgttttaaaaactcactcagtcccggcgcggtggctcacgcttctaatcccagcactttgagaggctgaggcgggcggaccacgaggtcaggagatcgagaccatcctgcttaacacggtgaaaccccatctctactaagaaaaacacaaaaaaattagccgggcgtggtggcgggtgcctgtagtcccagctactggagaggctgaggcaggagaatggcgtgaacctgggaggtggagcttgcagtgagctgagatggcgccactgcactccagcctgggcaacagagcgagactctgtctcaaaaaaaaaaaaaaaaaaaagattattcctaatagatacggtcttactttttgttttcctttgtgtttgtgcgttttctctrgtagcatatttttattccttgctttttattttagtgtgtctattttaagattttgccttgtggtcaccatgaagcttacagaaaatatcttgtagctagattatttatcctagtaacaacttaactttgatcactaaaaaaaccttctaaactttaactcctttcttactttccacattttgaattgttgacctcatttatgtttatcatattacatacctttcaacaaattattttagttgttatttttaatagctttttatttaaccttcatagtaaagatataagtaattttcacactgccatttcttttttagagtattctgaattcgactgttttcaaatgtttttttattactcagtgatttttttctttcagctcgaagaactccctttagcatatcttataagccaggtctggtggtgataaacttgttcagcctttttaacattttttattttttgctttggaaagtctttctcccttatttctgaaggatagatttgctggatacattattcttggttggcagatttttttctttctctagcactttgaatgtatcatcccactatctcctgccctgaakaatttctgctgagaaattttctgcatgctgtattggagctcccttgaatgtgatatgttttttatctcttatttctttgagyatttttctttgtttttcatttttgataatctgattatgatgtgctttataaactcctcttttgttgttccattggcagcctctgagcttccagtacctatttgttgtctttccccagatgaaaaaatttccagccattatttcctaaatatgttttttagacattttcctctctcttttccttcagaaacttctattaggcaagtgttagtttgcttgatggtatcctataattcccataggccttttccatttttgtttattcttttctttttacttctctgaattgataatttcrtatgtcatattttccagctaactggtttttctgcttgatcaaattagttgttgaagcattgtatttaattgttcaattaaattattttattctttattttgaggatttctatttggttcttatttatggtttccactgctttgtcaaacttttaatttgttcatgaattgttttccatatttcatttaactttttatatgcatttgyttgtaatttcttgaacttaagaggatacttctgaggtcttttttggtcatttcatagatctcctagtttgtacttgtaagcataaaggaaaatgagtatttaatatagaacatgtagaattaagtatttatcatcttgagaaaaatattytattattatttgtaattgtaattggcataataaatataataaaaagtaccttatttaatttcccaaatatcttattatatttttaagatattaccttataaatatgtagacagactaaaattgaatagcagtgtagaatcttgaacatttgagaacttgaaaaatgacatggttgtttttggattaacctttttcattcactcattaatcttttgttgactgaataaagatatccaartgtcgttattatagtaattttctttcctaaatttcatgatttggagagcttggtggtaagattttttgctcattacaagtattgatctgggacagatctggtgctgcttaaggaaagactaatamcatgtcccaagttctcctggttatttttatttaaatactgctggggaaaaggtggtggaaaattattttattccatttgtgtatataaatcactatgcatattttttactttttatattttacatgttatcttagcaaaaagaatattaatagtttcaaccaagcaaaataaatatgaaggctggattattaaaagtgacttttgcatttttaaccacattttatctttgaatttagtatcatatacaggagatatgaaaataaaagacatttatttttataacagtattaaaaatctattgaagtattgattgaagaaattcagttgaagtatttttgtaaacattgtgattatgtgggttattaagatacatacaaatgtggttttaaaattcaacaagagtaaggccaatatattttagcatgtgtaatttgtaaaaatacatgtttgtatttgtagtaaaacttatacacaagatcaaatatgtaaatattaaaggagaagragttgtatatgtatgtaaattgtttcttatttgaatgacatttagatactgtcatctaggtttagctatattttacagtacaaatttaattaaaatatatgctatggaagtattttaatgattttaggttgaagttataaaaacattcccatatttatttctttccaataaggaaaatttgtcagagcatataacacaccatttattcttcacttcattattttatctaccttttcctatgtgtcttttaattcttaatakttactaaaatttctatatcaaggaataatacacagagcttttaccttcaagttatttagtattggaatagtgcacaaaattataaacattgagataatgcaggcagaataaagtacccaagtaggtttgagaaatgcaccatcagctttcactgaattatgaaatcccaaatactgctgaagggtcaacaatgaaagacagttgtactgagaaggtaaagttttgaacgtctcttcatttatatagagggtttccccttgatagggaactgaggataaatatttgaagaaatatgrtggaggtttccagcaatactcataataattgaaacatctaattaaaatagggctaacatcattcatcagcctcacaatatcagctgttttccaagaacttcttatcactgggcctcttgtttttttatactaatgtatgtttgtttgtttcattcccctcccccaacctccacagaaaaacccttgtgaagagagaggatgggtgttcacaatttgttcacggtgactcagtttatccttatagggctctcttacttctccaatgagcactaccttctttttgtggcccttgccattatctgtcaggtgttcttggtgcgaagtggagacattctcttggccattgggactgtgattaagttgcacactactcatgtattattttttggcaaatgtgtccatcttagacatattgtgttcatcagctactatacctaagatgcctaagattctctagactgaggatcacagcatttcttttgttaggtgagctttgcagccctatttcctagtggcctgggctgggaagaaagctttctcactgttacggcttatgactggtgtgtggtcacatgtttctccctttgttacatcctgatcatgaacaaattggctctgtccagctggtttatgggacctgagcagctgggtttctaaatttcctcctcctccacgtagtgtctaccctctgcctgtctttctgcaagcctgatcgagttaaccagtattactgtgatatctcaccratgggggccctgttgtgccagtccatgcacctggcaaacatgcttgttttagtggaatcagttatcttggggatcagtgcttttctggctgcctttaacttttacatatacatcatctccactatcctaaagatccagtgtgtagagtggagtgcaaagtgcttctctacatgcacttcccacctccttacggtctgtttgttctatggcatattgacatttacctacatttactccttctccagtcaacactcacatgtctaaggcaagcccagatctagccacagacaggctcatctctatgctatacagagttattaccctgatgtttaacttcatcactgacaacctgagaaacacagaggtaaaaggagcctcagaaaggttttatgtcattgaacatgtttatagaaaccataatttaaaatataatagaatgactcaatgttccacttttaattcatagaaaaagtaattttctattgatatatagaatgyatacctacataggcgtataaatttatagaaaatacatatacatataacttcagttatatctatttatatgtatatgtatatttctatttgtgtacattgggaacttaacatttatcagccaaagtagactttttttttttttttaagttcyggggtacatgtacaggatgtgcaggtttgttatgtaggtaaacatgtgccatggtggtttgctgcacctaycaacccatcacctaggtattaagaccagcatgccttagctttttttcctgatactctccctctctacgccaccctccacccaacaggtcctagtgtgtgttattccctgtagactttttcagaataaatcaggaactgttagtagtaattacactggtataagatgtttaaaataggcctgtcttaggctgggcgcggtgcctcacacytgtaatctcagcactttgggaggcagaggcaggtggattacctgaggacaggagtttgagaccagcctggctaacatagygaaaccctgcctctactaaaaatacaagaaattagccagatgtggtggttggtgcatgtagtcccagctacttgggaggctgaggcaggagaatcacttgaaccccagaggctgggttgcagtgagctgagatcgtgccactgcactcaagcctgggtgacagagtgagactctgtctcaataaataaataaaatggtcctatcttaagtaaacttggatctataacacttaactatattcatactcatgcttgtacccatagccatatttatgtctaccaatatctatattgtgtgtgtctatatggtttatatctggctttcaacctgtatttaatctagctgtaggtgttttctttaatttttttcttttaattgttcatttacacttggaaattgctaagagagtgaatcttaaatgtaatcacaataaaagataattatgtgaggtgatggatatgtaaattcattttgtttgataacttcacagtttatacctatataaaagcatcacattgcatactataaatatatgtrtrtgtgtgtgtgtgtgtgtgtgtgtgkgtgtaaactataccttaaggctgggggaataagctaaagtggtcaacataacctattatatgataaagatatatctatgttggaaatttttctgatattgttatcaaatatgtaagatttaaatgacagtattttcattatattatttgtaacctgtgtaaatggaataaaatacccatttatggctatctggtgaaactgttgrgaagtaaagcctgtgcattgatcacccttctatgtttgttgttattgatacttctcctttttgttgacataacatgctatgacttcttctgtagttttactttcaacctacttgttttgttactttatgtgagtttctcatagacagtttatagttcaattatgtatttttatccagtgtccaatctctgtctttcaatttgcatatattattgcatcatttacttttaaggtaatcattaatatgctacaatttgtcgactttttaatttgttttgtgtttgtttcttctgtcttttatttctctgcttttcatttattgattttctgatgttttctttaagatttttaaggattctaacttrtgtatagcatttttattacatcacaatgtatagtttttttataccaactaatgttgttataatttttctttcaaccataaaatataatttaaggaactcatgagagaaatatagtatattgtaattatttctctttgtacaaaatttgytttttcctgtatgacattgtggctttcctatctctgtagaaaaccatatatactgtactcttaaaaatactaagagagtgggtatacagtgtttccaccatgaaaatgataattatgtgaggtaatgcatatcatatgttaattaactaaatgtagtcactccacaatgcatctrtacttcaaaatgttaggctgtaaacaataatacataaattttatgtcaattatttttgaattacaaaaaaatgaatgcaagttgatctcaaaaagatgtcataaagaataaataaaatgagaacacaatatcaacaaattatatgaacctaacaaaatagyctaaaaaataaaccaatagtattctattttcagaaatatcaaatatgtaaataccttaataaacttgaaaatgcatgcattaaactaatactgtatactatactctcccaaaaaaagagtggagattatttaccagcacatataaaacaacttaaaaatggataatttatttcaccctaaaaatgagtctcaataaattccaaaggttcaaagaattacaaatattgtggaatgtgtaatacatgtatgcacatgtggatatatgtatatctgtacatataggtatatatatgtgtgagtgcacatttgtatgtaagaccattatgaagctatctctagattatattgttaagtaaaaaaaaagtataatgcagaaagggatttttaatatttgcttatattacagttatgttacatataacatataatgaaacattgcatatatacatatatataacagtttatgatatatataacatatatgtataacagttctatatccaaggttatataacatatatcyaaggttatatatataacagtttatgatatatataacaacatgacattacatatacatatacagtaaagttatatataatatgttatatataacataagtgttatatatgttatataacatgttactaatatatgtcacatatataaaacaaaatgttataattataaaacaaaatgttatacgtgtaaaacatgaaatgttttatcattttctttatcaatttatctgatgatggacacaactgctycagatgtatttgtaagacaaaattccaacatgttttcataattgtggaaatatattgtaaaaatatgctttactaatcacagcaaatgatrtatttcttccaacttgttataagatgtgttgtatattgtatatttttattatgtagcctcagttttggcattctcactctctcaacctaactttatttcatgatttagtttgtgacttcaaatctgcatttatgatacatttgctagtagatactcatagcaactgccatagtatagacacccatttctcatcccatctatgttacatccaaattttttcaggggtgccaagtgcctaattttagaatatactcttccaattggtacttacaacttgaaatggtgtaataatatagctatagccaatgagatgtagcttatacttactgggttatccttataaaaataataggcagtgcttcatttgcctcatgaaatctctgtccttagccttcattctacttgggttatggatgagacgcctagtaatacaaaagccattcatgatcctagggaaaacaatattgaagggcagaacaagatgactgaaggtgcctgtttcattgatggacccattgaaccgccatacacactattgactgcctgcctaatgtcagactaatgttgcatgaggcataagtgtactcactggtttaaaaggactggagtaatattctgtcactttttcctgaacacatggagactttagagtttgcccaataattttattcagtagagcacgatttttctccaatgaaatctaaataacgtaatgaggttcaaccccagagtagatacctcattatcacaatgctgtaagtgaatgaacccagcctattaagcaagggaaaatttatcacacacactacttctctcyagctcacattcacataccaacaaataaatggcacaaaatacacaaaatgttttgtgatatttgcatgtatgatgtgcacatgcacrtataggtaaatatttgtgtatatgcatatataagtattcgaagttatgtacatatttttggaaaatgttggaatatatattatgacatatatttatgtgagggtattgtgcatattgctttatgaatattcttcacataaagagtacagaattttggagacaatgagactgctaggaagaaggcaggaataagagggaagggaaaattggagtggaggtaagtatgaaaaaycagtaaaatctgagatgctctagaagatggttctggagtacagaagtgatgttgcatgttgaaactactagtgtttcagaaatgcaaacaccttcctaattcctgcctgcatctccctattctggaagctgtacaccatcgggtttaatgtgggagtcacaagagtatagagtgcagctaccaccttgtctctttcaaatgtatagctggaagcagggcggatataggtgtagattacaggagaatagtaaagggtcaccactgtgagatgagatgagcatgttgagaaggccttcctmttgccttctactgtgcggatacrgagaatagcaacaatgataaaaccataggagatgcaggtaagaataaagtcccctatggccagggtaatatcagcaacatacaccatcacctcrttgattcttasagggctacaggacaaagccagcaatgggggtatctcacagaagaagtggtcaatggtgtttggcccacagaaagtcaacctcatgataagagctgtgtgcacccaggaattggtgactgcaatagccatgaccatgctgagcaaggctacacacatatggtggttcataayagtactgtaatgaagagggaaacaaatggccacatagcggtcataggccatggtggtraagagaaccatctcagctcccagagaccatgtgaacaagaagagctgggacatgcagcctgcatawgaamtggtattttctgatgttagcatggtccccagcatcttcggtatgatgcttgttgtgcagatgatgtccacaacagccagtgtcagaaggaaaacatacatgggcgtatgcaaggtgttgttatagattwtggcaatgatgatgagcatgttgccgagaaaagccacaagatagacaatgagaaaaaagaggaagataattccctggagttcaggctttttggtgaggcccagaataatgaactcagttacaacgctgtgattcatcctgcttgggtgattgaatggcagtaattgcacagaataaacaactgaaaatggaaagaatccctgtgttgttaggagataacatgaggagtgtgtgtacttagggacttaattcttgattggacacaactttgcagcaggaattcccatwtgatggagttctgtattccaggcaatatactctgttttccagactaatcccattctctgatgtatgttcctccattgatgactcaaactgaagccagtggttgagaagaaaaatattttcaaaatgccttcaaatattttgatatcattttcacttaaaacttgtytaaatacacacacacatatatatatatacacacacatatgtatatattctggatatgcatatatatccaatggagctgtaatacaaattattacatacctcaataatttagttaattgcatggtacatttaggtgtccttgagatatacaygagcaaagatacttgaaataatacaagctgacagggctaattatagtgaggatatttcagatgaaaaatgcccaacctagtattttgaggctgtatattcatgggaacattgactaatgtatcacagtccaaatactaaacaatttaatcaaatgtctgtattagtagtttttcatcggtttgagaagcacattgccaaaattcactggaccagctatttgttttgctgttatataatggcaagataattggatttaaaaatataaaatgtarggttgtgtcttcatttcatcatagctatagattggccatttaagctctgtaagatttggatttattatttctaaacattgaataaattgaaataaatatcagatgttagag

SEQ ID NO: 1593 - DNA, 12924 bp, Homo sapiens
ttgaatttaaaaaaaaaaagatttcttccaaaacttagaaaacaatgtaaatgtgaaaaataatgtcttcccaaacatagagaataaaatgctttcagacaggaattgcattggcttcagatgtcctagggtgaccaactttcccaggttgcctgagactgacaggtctcctaggatgtgrgtctttcagtgrcaaaacttggacaatccctggctaaccaagtggttgattrtcctttgtagggtagggccatgatttgtatgcaggtattgactctccttaatctccrccaccttttctctttttacaatttattatactgccttcacactgatcttcctttcctacctctcygatcacttcgaaacctagaaaattaagaagtagctactttcacttcttttctagtacttcaacagtgaagctaagctgaagagaatgtaacattctccttaaacgatgcttgaactagaatcacctctgacktagccctacctaatagaaagtggcctagaatgaaactgtctgacagaagtcattcaggaatatgagagtacgaggaaatttgtatcactctgtccccataaaacacagtggctgctgtggggagttcttagtaccttgccttagacaacataggccctttaaacgtgtgccgatattgtttattatgacaatgaagatgaaaatacttgaagacggagatgatgataatgatgtaatggatacataagaataaactgtgctgttggagttgacataggtataacattggcttataaaatgcaacatgagtgaattttgtcattagactccctggattcagatttccatgtcgccagtgtctgactgtgtgacaataagcacatttgataactaccaaatttcaccaactacttcatatgtaaaatagtgacataaatattattaattttttttgagacagagtttcgctcttgttgcccaggtcggagtgcaatggcgcgatctcggctcactgaaacctccgcctcccaggttcaagcaattctcctgcctcagccycttgagtagctggattacaggcatgtgccaccatgcccagctaattttgtatttttattagagatggggtttctccatgttagtcaggctggtctcaaactcccracctcaggtgatgcgcccrtcttggcctcccaaagtgctgggattacaggcgtgagccaccgcacccggccstattaattcttaaacttatyctcatgattcagcaaaatagcatggtgaatggcacataaatcaagcatcattgtgtattattagtaaatgtttggtgttctaaagtaagtaaacagaatgtgacctcaattcactccttccaggaaaaggttgccagtgtttatttggcagtgcactgcatcctgccagacaaaatggtctaagttttttctgtatgtagttttatatcactttcattttattctggcaattctatatcactttcattttattctggcaattcattattataaawaaatcctattgttaaacttaaattgataatgttctacaaaccaggtggtgcctgtaaacacagtctccatttaagatggacaaatactgtctccctstgaattcatcctctatgatgccttcagggctggctttctaaaactggggtatgtcacatactacttcctctctcagaaatctaaaatttctcccttatcgactacttaayaacaaaataattccttaccttagaatataataatctcaagtagtccyatcttttcttatttttatttttatttcattatgacagggtctggctctgtcrcccaggctgcagtgcagtggcacaatctcggctcactgcaacctccgcctcccaggctccagcgattctcctgcctcagcgtcccaagtagctgggattacaggccggctaatttttgtattttttgtagaaacgaggtctcactatgttaccaaggctggtttcaaactcctgggctcaagccatctgcccaccccagcctgccaaagtgctgggactacaggtgtgaaccacacaccaggccagttttattggaatttatcttctctttcctcttccctttccamtcgcactcctcaaaacctgcttacttttggagacaatamcacattcctgtggactaaaagcagagttattcatgagaataaaaattgtcccatataagggwagatatgcaggagaaagaagaacagtataaatggtaaatataaaggaatattgactaagcaataaaaatcacgggtgctagggtttcagatatcacactcatgtttttggttagtattttcattattttatccaagaccaaattaagtgtkctatgttactatataaaattgttttataactcyaatgattttctcatggtcccaaagaatattagtttattgttcattgttttatcactgatgctgaaataactgagaatgtatattacattttctacatcgtcataatctaatagcataatgattagcataaactgtggcctttaaatatttaatgaataaagtcacctttattataattattatagaattaattgaattatcttttattgccctaacccaatctggttattcttaaattattataatatttattcaatcttttcaaatacatttctggaaatttcttccattaaatagtaaaaaactccctcattattaacgactgaatactcacatactaaaacatgatttttcaaaattatatatttggaactctaaataataattatttttacctttgattggtagctcaataagtccccagaatagggctaaagattcatattcattatttaatcctcaaagaatctcggtgagtttactactgttatctccatttaaccaatggggatggactgaggcttgaagaatgtcttaaaaatggaaggtcacagacagggtcaagattaggccatatgtattataatgattcaaactaaatttcactgatttttcttgcctccagattttgatcaatagaaaatctaagctagattaaacataattactagagctgaattgataatttcagaggagatgaccagggatggacacggccaggagtaaatggcttttgatttgcagcaaatagaaatagactttctatttctggagaaagacactttcctgctgatgcaggcaggccctcttcttctggatactgtggcttttttggagcctacagtagcatgcaagtcagactaacatcaattgcagaatttcaagagaaactactgaccactgtttggacacctatggatagaaaatagtacatatctccaccttaagccaatgatggacatcctgaacaaggttttcatagtcagtagataccctctcctcacagtgaactgtgtcacagtgtcattccaggttcagcctccttcacacacaataaccacccaaaccaaggaacccgcagtgagaacaaagtcaagcaaaccaatgtcataactccagagaagggggtgaggacattacaagaagaaaagagaaacagaatcctcaggttcccttgcctttgctcttaacttagagatggtggaacaggggtgcacttttccatctcctgtgaactttaagaattttttgaaacttgcccttgtgtacttgggactgggatctccttcttcataccctgctttaggaaaattgatcagtaayagttacgtggatamataacattgataaataacagtacttacattaataagtgacagttctccaagaaaaaaaaaaacaaagcttttttcttcaacaatgaaagctcagtttatatttgagtgcctgtttttggtgattaagatcaccaaaargctgaaaggggtctgttatcttataaatttatctcaagaagctttgacgtcagatttatgattaagatgaaatgaccagaccagaaccrcttactatttgaaaacatattcaacacatagtattttttaaattagttaatatcacttcagttcagrtctttcaaagattctaatatttgaattaaattttaagaatcaactatcttgtctatattttcctcttccaaatcatctcgtattcaaaataaaaatccatattctttcagatctgtcttatatttcttagtttttgtgtacacttgccatattattttgtgttttgcttgaaagtatatagtagaraggtgaatagcaaattttttggagtcagatgatctaggtgttaatcctggcacttatgagacacacaatctacctactattatttttactcccatgcattgtttgcttatcaactacataaagataaaaatattaaagactcartgtgcttgtgaggacaaaattgtatcatctctgcagaggacctaacatagagcctgtcacatgtcaaagacycaaataatggtggctgtaacattccttcagtatgrgtaaattaatactaaagctagagattctgaaatggattatggattagacaaaagctctatttttttcttccagtttaaagagttaaagatgaatttatcagtagctaaaatttggttaacaaattattgaggctacaaggcatgagagagcaraacagactagatttgtggacgcacactcaaaaacactttttatttatgtctctgtttagataccagaggtacaatatgatctctgaaaacttaaagaacattgataaacataaatttatgactaaattcacaactattttgaatactttcactagattcatctaatcataatagttccaaaagccatgaattcgtgtaactgtctgtgcatacaaatgtaccaaaataaataagcataaaagaaaacggacagcaaccaagtgcagtggctcatgcctgtaatccctgcagtttgggaggtcaaggcaggaggatctcttgaggtcaggagtttgagaccagcctgggtaagaatgagacccccatcttttttagaaaagaaagtaaaagaaaacagaaaacagaatgctatggaagttttgggggaaaataacataggacacagatttttcttgtgtcctagaaattattttccagaaaactccagttgccatttatgcttgggtatcctttagaaatcatggctctgtctctctaacatctgatatttatttcaatttattcaatgtttagaaataataaatccaaatcttacagagcttaaatggccartctatagctatgatgaaatgaagacacaaccytacattttatatttttaaatccaattatcttgccattatataacagcaaaacaaatagctggtccagtgaattttggcaatgtgcttctcaaaccgatgaaaaactactaatacagacatttgattaaattgtttagtatttggactgtgatacattagtcaatgttcccatgaatatacagcctcaaaatactaggttgggcatttttcatctgaaatatcctcactataattagccctgtcagcttgtattatttcaagtatctttgctcrtgtatatctcaaggacacctaaatgtaccatgcaattaactaaattattgaggtatgtaataatttgtattacagctccattggatatatatgcatatccagaatatatacatatgtgtgtgtatatatatatatgtgtgtgtgtatttaracaagttttaagtgaaaatgatatcaaaatatttgaaggcattttgaaaatatttttcttctcaaccactggcttcagtttgagtcatcaatggaggaacatacatcagagaatgggattagtctggaaaacagagtatattgcctggaatacagaactccatcawatgggaattcctgctgcaaagttgtgtccaatcaagaattaagtccctaagtacacacactcctcatgttatctcctaacaacacagggattctttccattttcagttgtttattctgtgcaattactgccattcaatcacccaagcaggatgaatcacagcgttgtaactgagttcattattctgggcctcaccaaaaagcctgaactccagggaattatcttcctcttttttctcattgtctatcttgtggcttttctcggcaacatgctcatcatcattgccawaatctataacaacaccttgcatacgcccatgtatgttttccttctgacactggctgttgtggacatcatctgcacaacaagcatcataccgaagatgctggggaccatgctaacatcagaaaataccakttcwtatgcaggctgcatgtcccagctcttcttgttcacatggtctctgggagctgagatggttctcttyaccaccatggcctatgaccgctatgtggccatttgtttccctcttcattacagtactrttatgaaccaccatatgtgtgtagccttgctcagcatggtcatggctattgcagtcaccaattcctgggtgcacacagctcttatcatgaggttgactttctgtgggccaaacaccattgaccacttcttctgtgagatacccccattgctggctttgtcctgtagccctstaagaatcaaygaggtgatggtgtatgttgctgatattaccctggccataggggactttattcttacctgcatctcctatggttttatcattgttgctattctcygtatccgcacagtagaaggcaakaggaaggccttctcaacatgctcatctcatctcacagtggtgaccctttactattctcctgtaatctacacctatatccgccctgcttccagctatacatttgaaagagacaaggtggtagctgcactctatactcttgtgactcccacattaaacccgatggtgtacagcttccagaatagggagatgcaggcaggaattaggaaggtgtttgcatttctgaaacactagtagtttcaacatgcaacatcacttctgtactccagaaccatcttctagagcatctcagattttactgrtttttcatacttacctccactccaattttcccttccctcttattcctgccttcttcctagcagtctcattgtctccaaaattctgtactctttatgtgaagaatattcataaagcaatatgcacaataccctcacataaatatatgtcataatatatattccaacattttccaaaaatatgtacataacttcgaatacttatatatgcatatacacaaatatttacctataygtgcatgtgcacatcatacatgcaaatatcacaaaacattttgtgtattttgtgccatttatttgttggtatgtgaatgtgagctrgagagaagtagtgtgtgtgataaattttcccttgcttaataggctgggttcattcacttacagcattgtgataatgaggtatctactctggggttgaacctcattacgttatttagatttcattggagaaaaatcgtgctctactgaataaaattattgggcaaactctaaagtctccatgtgttcaggaaaaagtgacagaatattactccagtccttttaaaccagtgagtacacttatgcctcatgcaacattagtctgacattaggcaggcagtcaatagtgtgtatggcggttcaatgggtccatcaatgaaacaggcaccttcagtcatcttgttctgcccttcaatattgttttccctaggatcatgaatggcttttgtattactaggcgtctcatccataacccaagtagaatgaaggctaaggacagagatttcatgaggcaaatgaagcactgcctattatttttataaggataacccagtaagtataagctacatctcattggctatagctatattattacaccatttcaagttgtaagtaccaattggaagagtatattctaaaattaggcacttggcacccctgaaaaaatttggatgtaacatagatgggatgagaaatgggtgtctatactatggcagttgctatgagtatctactagcaaatgtatcataaatgcagatttgaagtcacaaactaaatcatgaaataaagttaggttgagagagtgagaatgccaaaactgaggctacataataaaaatatacaatatacaacacatcttataacaagttggaagaaatayatcatttgctgtgattagtaaagcatatttttacaatatatttccacaattatgaaaacatgttggaattttgtcttacaaatacatctgragcagttgtgtccatcatcagataaattgataaagaaaatgataaaacatttcatgttttacacgtataacattttgttttataattataacattttgttttatatatgtgacatatattagtaacatgttatataacatatataacacttatgttatatataacatattatatataactttactgtatatgtatatgtaatgtcatgttgttatatatatcataaactgttatatatataaccttrgatatatgttatataaccttggatatagaactgttatacatatatgttatatatatcataaactgttatatatatgtatatatgcaatgtttcattatatgttatatgtaacataactgtaatataagcaaatattaaaaatccctttctgcattatactttttttttacttaacaatataatctagagatagcttcataatggtcttacatacaaatgtgcactcacacatatatatacctatatgtacagatatacatatatccacatgtgcatacatgtattacacattccacaatatttgtaattctttgaacctttggaatttattgagactcatttttagggtgaaataaattatccatttttaagttgttttatatgtgctggtaaataatctccactctttttttgggagagtatagtatacagtattagtttaatgcatgcattttcaagtttattaaggtatttacatatttgatatttctgaaaatagaatactattggtttattttttagrctattttgttaggttcatataatttgttgatattgtgttctcattttatttattctttatgacatctttttgagatcaacttgcattcatttttttgtaattcaaaaataattgacataaaatttatgtattattgtttacagcctaacattttgaagtayagatgcattgtggagtgactacatttagttaattaacatatgatatgcattacctcacataattatcattttcatggtggaaacactgtatacccactctcttagtatttttaagagtacagtatatatggttttctacagagataggaaagccacaatgtcatacaggaaaaarcaaattttgtacaaagagaaataattacaatatactatatttctctcatgagttccttaaattatattttatggttgaaagaaaaattataacaacattagttggtataaaaaaactatacattgtgatgtaataaaaatgctatacayaagttagaatccttaaaaatcttaaagaaaacatcagaaaatcaataaatgaaaagcagagaaataaaagacagaagaaacaaacacaaaacaaattaaaaagtcgacaaattgtagcatattaatgattaccttaaaagtaaatgatgcaataatatatgcaaattgaaagacagagattggacactggataaaaatacataattgaactataaactgtctatgagaaactcacataaagtaacaaaacaagtaggttgaaagtaaaactacagaagaagtcatagcatgttatgtcaacaaaaaggagaagtatcaataacaacaaacatagaagggtgatcaatgcacaggctttacttcycaacagtttcaccagatagccataaatgggtattttattccatttacacaggttacaaataatataatgaaaatactgtcatttaaatcttacatatttgataacaatatcagaaaaatttccaacatagatatatctttatcatataataggttatgttgaccactttagcttattcccccagccttaaggtatagtttacacmcacacacacacacacacacacacayayacatatatttatagtatgcaatgtgatgcttttatataggtataaactgtgaagttatcaaacaaaatgaatttacatatccatcacctcacataattatcttttattgtgattacatttaagattcactctcttagcaatttccaagtgtaaatgaacaattaaaagaaaaaaattaaagaaaacacctacagctagattaaatacaggttgaaagccagatataaaccatatagacacacacaatatagatattggtagacataaatatggctatgggtacaagcatgagtatgaatatagttaagtgttatagatccaagtttacttaagataggaccattttatttatttattgagacagagtctcactctgtcacccaggcttgagtgcagtggcacgatctcagctcactgcaacccagcctctggggttcaagtgattctcctgcctcagcctcccaagtagctgggactacatgcaccaaccaccacatctggctaatttcttgtatttttagtagaggcagggtttcrctatgttagccaggctggtctcaaactcctgtcctcaggtaatccacctgcctctgcctcccaaagtgctgagattacargtgtgaggcaccgcgcccagcctaagacaggcctattttaaacatcttataccagtgtaattactactaacagttcctgatttattctgaaaaagtctacagggaataacacacactaggacctgttgggtggagggtggcgtagagagggagagtatcaggaaaaaaagctaaggcatgctggtcttaatacctaggtgatgggttgrtaggtgcagcaaaccaccatggcacatgtttacctacataacaaacctgcacatcctgtacatgtaccccrgaacttaaaaaaaaaaaaaaagtctactttggctgataaatgttaagttcccaatgtacacaaatagaaatatacatatacatataaatagatataactgaagttatatgtatatgtattttctataaatttatacgcctatgtaggtatrcattctatatatcaatagaaaattactttttctatgaattaaaagtggaacattgagtcattctattatattttaaattatggtttctataaacatgttcaatgacataaaacctttctgaggctccttttacctctgtgtttctcaggttgtcagtgatgaagttaaacatcagggtaataactctgtatagcatagagatgagcctgtctgtggctagatctgggcttgccttagacatgtgagtgttgactggagaaggagtaaatgtaggtaaatgtcaatatgccatagaacaaacagaccgtaaggaggtgggaagtgcatgtagagaagcactttgcactccactctacacactggatctttaggatagtggagatgatgtatatgtaaaagttaaaggcagccagaaaagcactgatccccaagataactgattccactaaaacaagcatgtttgccaggtgcatggactggcacaacagggcccccatyggtgagatatcacagtaatactggttaactcgatcaggcttgcagaaagacaggcagagggtagacactacgtggaggaggaggaaatttagaaacccagctgctcaggtcccataaaccagctggacagagccaatttgttcatgatcaggatgtaacaaagggagaaacatgtgaccacacaccagtcataagccgtaacagtgagaaagctttcttcccagcccaggccactaggaaatagggctgcaaagctcacctaacaaaagaaatgctgtgatcctcagtctagagaatcttaggcatcttaggtatagtagctgatgaacacaatatgtctaagatggacacatttgccaaaaaataatacatgagtagtgtgcaacttaatcacagtcccaatggccaagagaatgtctccacttcgcaccaagaacacctgacagataatggcaagggccacaaaaagaaggtagtgctcattggagaagtaagagagccctataaggataaactgagtcaccgtgaacaaattgtgaacacccatcctctctcttcacaagggtttttctgtggaggttgggggaggggaatgaaacaaacaaacatacattagtataaaaaaacaagaggcccagtgataagaagttcttggaaaacagctgatattgtgaggctgatgaatgatgttagccctattttaattagatgtttcaattattatgagtattgctggaaacctccaycatatttcttcaaatatttatcctcagttccctatcaaggggaaaccctctatataaatgaagagacgttcaaaactttaccttctcagtacaactgtctttcattgttgacccttcagcagtatttgggatttcataattcagtgaaagctgatggtgcatttctcaaacctacttgggtactttattctgcctgcattatctcaatgtttataattttgtgcactattccaatactaaataacttgaaggtaaaagctctgtgtattattccttgatatagaaattttagtaamtattaagaattaaaagacacataggaaaaggtagataaaataatgaagtgaagaataaatggtgtgttatatgctctgacaaattttccttattggaaagaaataaatatgggaatgtttttataacttcaacctaaaatcattaaaatacttccatagcatatattttaattaaatttgtactgtaaaatatagctaaacctagatgacagtatctaaatgtcattcaaataagaaacaatttacatacatatacaactccttctc

SEQ ID NO: 1594 - DNA, 13451 bp, Homo sapiens
ttattttttagctgatagtcgaagtcctcataggactattagcgtatcaaaggcagtattgaattagagcagttgtttgctttgggtcttagaaattcccagagtttagcagcagaacatagaatagtgaaagtgggttcttagatggggacagccaggacagggtgttctaaatcacattcaagttttgcgtatatgactggagtagatggagatgggggaataatgaagttatgactcaatcagtcctttcatttcattctgcttagtgaattttgaataaaagaaaacctgtgaaaaaggaagatttaggaagatttgtactggacccttgctgctattatgcagaatggtacatgggaagaaaggatggaaaaataaatcaagagcatcgcttcacttaggttttcagcaaacattgggatagctgagacattttttcattaaaggttagcttgccagaaaggtggttgagagtgagtgaattattagtatgtaggtactatgattgttagattatcattaaacaggaagtagatgactggatggagccttgaagaattactagagtaggaaaggtaatttagtcattgatgtgcaatctataaattccttgttatttgaaatttgagtgttatttatatagggatttgrgtaaagtaggtttatgggaactaaaatgtaatctaatgaggtaatggtatttatcagaaggtgatataattctcacaacaatcttattacctggatacttgtataattcccactatacaagcaaggaaactgagttacggggaagctaataaacttggccaacaatatacataaacacatggcatggcagggttttagatcgaggcattctgattctacaggcgaccttcttagctgctctgctgtgatgccatgggcagagaaccacagtttcagaaatacatttaccagcagggacactcgaggtgatctaattcatggccctcattttagaaataataaaagggctcttcgactgcgactgaatggcttgttttatggcttacttaccctgggatggaaaaagcattttaatgactctttaatttcctcttattatggatagctgggtagtataggggagtgagagatcatctctgactcccctttttgctcttgtgtaaatgggctctttggctggatctgcaaactaaattgacaccaggcatattaacaagtgaaaagcatatacatcatcgacgtgttcatggggatcttcataagagagtgaatccgaggaagtaaccacagcaagatgcttgtatacttttttgacaaagaacaatgaatttgagaagaaatgacaggacaagtaaactttggtgaggggcaataaattttctaggggagttactgagatatatagaggggtgtataaaactagtggaagataagggttacttcattaagtatatttattcaggtctgttgcagcmccagttctcaatgtctggtggtaagggctgttttctcaccccagtactggaagggtacccctcccagaggaatcttgatggcttactgcatgcgggaagagaaaggtcagctagccccttctgaaactacaattcctccagtgttttcaacttgaaatagtcaataggccattccagcatattttgggatggcatgtccttcactccttcagtagggataatgaaaaaagagactttcctggggcagctataggcttctgctctgaggtctcttccagctcttgcaagtatacccaacatagctgatttttagcttttctttctaagtctgcatgtttttgaggctatcctttgattcttctaggtctgacaaagggtagagttggacatacgttttagtaagatatgtggggtcgaatataggttccactgttctaatggagaccctaagttacatggctcaaaaagttaaaattttatttttctctcatgtaacattttrgataatttgatgattccctaatgttgggacccagtcttttctgtcttaggctcacaactatccttgagcctgtgtcatgggggatgactctgaagctgcgtgcaccctgttcattcacattttcttggcctgaacttagtcactaggctattcctaactgcaagagaagctggaagatgtagtcttccttctgaccagccatgtgctcaaccacaaattgagtttcagttattggagggcagaaagaatagatatggggctgctttgtaggctgctgctcggggcagcctctgctgtgttatttgagatttataattttccttggcttcccagatgacagtggaaaaaggcatagtcaagacttcaagtgcggaaaatgttggcaactctgacatgcaagttcttttccatatasagctgagttatgctggagtattttggttacaaagacttcattttctcacctgtctgaattcctgtttggattttagttactcttgatttatcagcatggattaaaaattgaaaagacttggtattttaaaattatatctgaaatggcagagacagcatctgaggattcctcttgctactataaggaatgagtaatttagtttgatttttctttaaatccaaataaataagatgattaaactcaagataaagctgtaatatctcttatcgtgtcctgtcatttgtcattgctaccatgtcttgaaagctttgtggaaaaataatggttttgatatttgttattgagatagaatacccacaaataggtatttaaaatatttttgtcttagccagttgattgtggcgtgtgcatggactaagcaacttaaaaaaaaagaaattggtttgttgaataacagctttcactagagacactaaagtccacaaaacctcagtgagcagttgtcagattccattttaaggaggcaaagctaaactttatatgcgtttcccaccatgtgtaaatccaaacagcaagcaaggactattaaatgttttattttgctagtggcagcaaagaatgtaatgttggatataatatagtttacatttacagttgaagttatattttcaattgtatggaataaaatgaataggtctctatttcatagccaaagtggacaatttatagagtgattttctagaacaccccaatatgtagtgacattttgtggcagtgatgccacatgtaggaartggatctctatagaactttgctattaatgttgcggggtatttgttgcatgatgtagaaaatgctatccgggttacctttcattccttatatctgacttagcttaacctcagctgatggcttaagtcagtggccaagaatttttcatcagctgtccttggtaacatatatcattcatcatactaggatgattggtgttatcaattgaaaaatctaaatggaagacaaaattaaatgctacttgagaagctagagtgaaaagagaatgtcttggctctctaacatttcctctcttttctacctgtattcaatatggccatgaatatccttttggagacactttgaatctcattgtgttcaattacagaggaactcttcagcaaataacccttgtatggtgtgcttctagatagtgtacataagaaactgtgtgctgtaaattctgctttcccaaatgttataaaggtatatgattgcatttttctataatataatatatcatataatataatacagatgtttgattgtaatttaccttttaagaacacatagtcttataatggtatatgggcaggatacctgtggggtcaaaggaaaagaacatgaaccaattttgttttcttagagcctgtgctacctacttttagatactttaatcccagccaactctctttggtataagaatggtttgaacttctgttagctaaactgatatactatgtaatgttcatgattgaattgataaaggtgttttttaaaaactgaaattatgcctcattatgcattgtttaaaaataacttttaaatgattatgaaagtaaaaatgtgttcttggtaaacactrcaacgaagtataaagagagaaaggaaaatgatccatttctcccaaatataaaggtaatcattagtatcattttggcatatgtatttatgtatgtatgtatttattttttctgagacagtctctcgctctgtcgccaggctggagtgcagtggcgtgttctcggctcactgcgacctctgcttcccgggtttgagcaattctccwgcctcascctccctagtagctgagastacaggtgtgcaccaccacgcctggctaatttttgtacttttagtagaggtgtggtttcaccatgttggccaggccggtckcgawctcctgacctcaggtgatccgcctgcctcagcctccgaaagtgctgggattacaggtgtgagccactgtgctgggctatatgtatgtatttctttgtgatggtgtccttaggcttttttcagtactgtacatatagaaaacaaaatgaagaccaaatagtgtgttcagcctggtatcttttcacttgtgagaaatttttcgtggggtttaaagcatgttttttaatgttagcattgtattatttgaccatttcactgtttttggacatttaatttgcttctagtttttcattgttttatatataaaatgtatattgttctccctcattgtctaaatctttctctttgccacactacacttcatgtttcttaggaggaagatttaatagtcttttaagcttgtcatgaagatgaatttttagaaaatgcttgatcaacatcaattttactttaacctttggtctcgtcatcattcatcatattctattactttagcagcattcaaagataatgaaagagattcagataaattcttgttactctcagatcaaattcatttacaataaatatgtgaatcttgatgatcagaagctaaaatacttattgaacctggacatcaagccagatcctaaatctttatgaaaatgcaccacaaattcttcttgttacataatcttttctgtaggttaaaaaaaccaacaaatcctagcatgttgacattctgaagaatatatggctttaaacagtctcttgcaaactatagtactggctcaatgaaatgttatacagcatcagtcaggatttttaataaaatgctgttggttctccaattgaagagtttcattctgtttatgtaatgatgttcatgtttgacctgaaaatacctcctcattctacggcatttcatcttcaagagaaaccttattagtaatttgtagattagaaataaagtcacagagggtagtcaggagaacacaggtctctgtaaacctgactcttttattaaacatactttgccatgaatacttttcattgagctgtttttctacctatttaagatgaaccagatatgacatatttctgtattttatttcacaatcctatggtatatacccccaacacccacacagtggttataactgtaaaatgaaagttttgcatgtgtaacatgtcgtaacattcttatttcactgccttgtttgaaatgcatataaatttaaatgtgaacattttatactattcttttaaagattttaaatattatatatgtataatgctttattagattaatttcttcctgttaaattccctatgaactgtgtaacttgagataaaaatgttacaatcatttaaaagtgttaaaacatgcagtaaaatcttactcatttggattcatttaatttacaatttgtcagaaaattagagaagaattatgtttacttacactaacaggatgggaaaggggtcatggggtgagagttggggagggtttggtaagaaaattcccctaaaggaaatctcaattgcctagcgaattattttatgaaatcatcatgtgtgttggatgttactatttatggagaataagttggtattctaattactagtttcattaaaacagttcccctaaggacccctacctgataacacttttaagactggatccakcctttctttgcggaatcaccatggcggctgggaccctgtacacgtatcctgaaaactggagggccttcaaggctctcatcgctgctcagtacagcggggctcagrtccgcgtgctctccgcaccaccccacttccattttggccaaaccaaccgcaccyctgaatttctycgcaaatttcctgccggcaaggtcccagcatttgagggtgatgatggattctgtgtgtttgagagcaacgccattgcctactatgtgagcaatgaggagctgcggggaagtactccagaggcagcagccmaggtggtgcagtgggtgagctttgctgattccgatatagtgcccccagccagtacctgggtgttccccaccttgggcatcatgcaccacaacaaacaggccactgagaatgcaaaggaggaagtgaggcgaattctggggctgctggatgcttacttgaagacgaggacttttctggtgggcgaacgagtgacattggctgacatcacagttgtctgcaccctgttgtggctctataagcaggttctagagccttctttccgccrggcctttcscaataccaacygctggttcctcacctgcattaaccagccccagttccgggctgtcttgggsgaactgaaactgtgtgagaagatggcccagtttgatgctaaaaagtttgcagagacccagcctaaaaaggacacaccacggaaagagaagggttcacgggaagagaagcagaagccccaggctgagcggaaggaggagaaaaaggcggctgcccctgctcctgaggaggagatggatgaatgtgagcaggcgctggctgctgagcccaaggcyaaggaccccttcgctcacctgcccaagagtacctttgtgttggatgaatttaagcgcaagtactccaatgaggacacactctctgtggcactgccatatttctgggagcactttgataaggacggctggtccctgtggtactcagagtatcgcttccctgaagaactcactcagaccttcatgagctgcaatctcatsactggaatgttccagcgactggacaagctgaggaagaatgccttcgccagtgtcatcctttttggaaccaacaatagcagctccatttctggagtctgggtcttccgaggccaggagcttgcctttccgctgagtccagattggcaggtggactacgagtcatacacatggcggaaactggatcctggcagmgaggagacccagacgctggttcgagagtacttttcctgggagggggccttccagcatgtgggcaaagccttcaatcasggcaagatcttcaagtgaacatctcttgccatcacctagctgcctgcacctgcccttcagggagatgggggtcattaaaggaaactgaacattgaaaaaaaaaaaaaaaaaaaaaagactggatccaattgctgaaaggacttgaaaagaattatagatgcattttttwaaaagtatcatatatgtttagattttactcatccttgttgctttcttaccatttattctagatagtttaatattatatgctttagtgaaagctaacttatttttgctgtttatagagaaattatttcttattataccctcacttccttaatttcaaaaaggaatctctgtgaattattataagttaattcaggatgagtagctttaaatcctttttctttttccttcattataaacatgatatggccttattgaactgtttgttcagtattcattctgatattgtcatatataaaacatagttttaaatggtcaagcgctatcctgtgtagataattttgatgggaaatgtgtcagcttgaaataaatcgatgtttgggaaattgttctcttaaagacggtaatctgaaaatgtgaatgctaaataatgaaaacatttgtacagtttgggggtagatgagttttaatctgtttctggcatctgtacattcttgtgatatctcacagagacctggagtgtttaggttgcaatttgtacccaccttttccatttctattgaattaataatggagccctcatccctctaggacatcaggagagaaaaaaaaatagacaatgtgatgattagcagagagtaattttgattaccctaaggaaaattaagatgatctttataagtggaccgggcaaaatgtggttttggtgagtatggagctagagaaagctagtcatgtttgggcaccttaaggcagagatcatgttggggaaagatattttggtgtcatccaaatgtttatctgtttgaaaaatccatataaatattagtagattatttgtgactatctatctgtggtcatacaaaccataaaatagctagatttcccactttttttcatttatcagggtgaatattttagccctgtctaaaacaatggtgcgcagtggtggggcaatactgtaccactttagaaagtgtttgagtagtaccccacttgaggagtacggcaccacttcaggcactttaggaatttgagggaagctgtggtgtttagtggcacggggagggatcttcatggctagcagtgcctgggggtagtttcccatctccaagaattgtcctgtgccctcyaacttctgaatgtcccatcagagattcatggagctgaaaacctatttacctggctgagaacttagttgttttatatataaacagaaagtatgttttgcatggttttaaagtatactgaattttccaagagtgaaactactgtgtaacaatagcttttgcatttgtgatgatttagcacacaaactcaagattcagactgttttattatgtctgctagggtagttatgtttgaacgtttacataatgagatgccattattttattataaattagcttgttttatttaaatattacacttagggcattatattgattacttttcttggtcacacaggaccatttgcgtgaaatggaaaagagcttgggtggtttctgtacttcatttagtttggagagttaacactgtattatagttttatctccagtgaacaaaatataatcatttttrwaacaaaaaaattaagctatgtatcagaaagcaatatccaaaggtaattattattttttaatttaaattatagatcttattttcctggaggctgtgtgagatcttgcaactattattcagaatattaagacatgaaatactagatatatctgattctcaatacgggttttaggaattgtctacttaagatgtctaaactgtagaatatgaattacgagcttatctcttgctatacggctatagcccagtattgatgttttctttcctacatggaatggaacatggagctagtttctatgggtgcttattgtgaagcaaacaataaaatgaacattatttgcgtaatatgccattcagatgagaaatttacaaaggtatatacatcctgatggagtgataatgctacaaaataagccattaacttgatgctgttgatgttcaggttgccaaactcttcctaacactgccttctggtacagtatttatgattatgaatgtgcagtgcagaactttcattctaccatcttcattaactttaatgcgtaagtagccacagttacccctgccaggtagtagacagatgccatttgttttgaaggcactcttaagatacattctccttataggatggtgaaggtaactgtcagctgaatatacctatattctctgtgtgcmtggtttaaatcaggtttatttgtctgccaactaaatggtgccacaaatggataataaacatgtttatttctaactcttgagatttatcctagtcatcttttggctcttcttccaatcaaaccctgtagcttttagaagataaggagcaggacaagatttatcctgtaacctatgctgttagtcatttagctctaatatacttggtgttgtatttcattgattgcatggatgctttgattattattttcttaaacaataattgctcttcattttaatgaatttattgaaattataagattaatgagtatttctattgagctgaaaatttaatttggctatatcttatggtataactttttgctcaactatctcaatcctgggagaatcagagtctttatctgaaatctgctgcttatattatgcaggtacatatatttattttgttctcttggaagatcttcrtggtttctctttagtgtgtttaaactagcacatgaaaataatagactttacaaaattggcsatgacctatatcagcaaatggtgaaaccagaaagaaaaatacattaaaggaaaaatcccaaaggaactgatatttctctaagaagcaaggtataacttttattaagcaacttaaagagattgtttaagaaatactgtaattggggagggaattatagtgtaaggattatgcaaaaaaaaaatgaagtaaaagggaattacaagtgggaaaagttacaaaggaaattagtatgttccttgaggttcagggaatctatgtatatttcagatcatggttgcattttcagtcttctgtttttcatggttgatgagttcatcaagtccttccatcttttggagtcatttctattcaccattcaaggatctatctaaaatgtataattatgtctccccgtaccattccctcccttcatatctttagtttaaccagtttcggtaaacacaggaatttgagcatcacctgtcacatagaagacaggtgatgtgtattgaacttatgttacactttctttgaggaataagaatttcctcacatttcctaagaatactcaggatcaagtataagtttaggaatcttggactttcttatttgatcctgaactcaratttatagcccagaaattttggtggctaagtgggtcaaaagattcctaggcaaaccttaaagaagacccttggactagccaaagcatttgtttagaatattgtttagtaaagacaaacaaaaatttgttaggaatccagagctgctttcaatcatccaagtatttattattttcagtaatggtttcaagtaaatggtttagagccacacttgctagaactaagcaattgcaatgcttggctttttctgacatgttttatgatcagtgtttatatctataactaattgacaaaatgccagtgtttgtgttctttaagatacattcaccattgagaaagaaattaaaatggtttctgagaagaattttaaaaagtacagactatacaagtatggaaagaaaacattcttttgtcttaacacatttctaaaaggagagtatgtgtgtatataaaagccatggaaccatacttactgaacttgaaatagttttgcaaatttccatggcaaatgggatttatattgcttgaacatttttttgtttttactccttttctcatttcacaaactttgccagttcccaaagatttgcttggaaactcactgtgctaataggcaaagttggcctttcttgtgcttctcttaaactagcccttcctgaaacactgaccttttagtttaataacagttttatttgagaaaatgttcagatcctgggagctgaaaagagtgttttcagaaaggccattttaaatagtggtctccaaatgctgtatctttttccctcatgcactttgggtcagacctatcagaagaaatacagtattgctttatgtattctattgatttaaaaacaaataccatgaagcttagatgtgctcagaacccattacctcactggtttattttcctggctgtgctttgatttgctattttagatttcaaactctttatgctaggtcatgtttttattttctgttattttaacttctcatttgtagctaaggtaattactttttcagttgtgaccttggacttgacccaaaagttgtgattttttttttttttccttttctggaaataggtagggcattagaaagayagctgtgctttggctcctttatggaccaaaagtgatgtcaaccagctggtcacttggacatgtctttttcagtggccatgggagtgttcctgtccctttcattgctgttgttgtcctcttcccacgtttttctctcctctcatggcctacctggacgatgccacctgtaatctgtatctctttctcacctcaccccacagcaagtggcagggctgatgatagtagggagaaggggatagagaaggaaacagcaagcctccagtctgcattttcttcaccccaaaccacttcctctccacattctcacctggatggcttcgtgcctatccacccagctggtcaccgtttgatcacactggaataaacagctcgctgctgatttgagcttttcctctggtaggaagacatccctatgttataggcataaagtgcactatgaagatatgacattgtgccaagtgaaataagccagacacagaaagacaaatactgtatgttcttacctatatgtggaatctaaaaaagttgagctctaggaagcagagtaaaagagtgattaccaggggatgtgggatggggaaatagggagatgttgatcaaagagtacaagctttcagttataagatggtgactttagttaataatattttttacttgaaatttcataagagaacaaattttaagtgtccccaatgttccccaccccratggtaactgtgtggtgctcgatatatttgtggtaatcattacatgattcrtatcaaatcatcacatagttcaccttgaatatatatgattctrtttgtcaattataycttaataaagctggaaaaaccaaactgcttaatctcttttctgttgcttataacagaatacgtaaaactgggtaatttataaggaaaagaaatttgttacttaatgttatggaggctttgaagtccaaggttgaagggctgcatatggtgtgggtcttcttactggtggggactcctgtagaatccctaggtcatgcggggcatcacgtggtgaggggctcagtatgctagtccagctctctcttctttttcttttcttttctttttttttttttttgtgagatggagtcttactctgtcrcccaggccggagtgcagtgatgtgatcttggctcactgcaacctccgcctcccragttcaagygattctcctgcctcagcctcctgagtagctgggattgcaggtgtgcaccaccatgtctggctaatttttgtatttgtagtagagacagggtttcaccatgttggtcaggctggtctcaaactcctgacctcgtgatctgcccacctcagcctctcagagtgttgggattataggcgtgagccaccgcacctggccttctttttctttttaaggtaccagtcccactatcatgataaaccattaatccatgcatggattaacccattcatgaaccctcatgtcccagtctcacctcttaagggcccc

SEQ ID NO: 1595 - DNA, 24739 bp, Homo sapiens
tctactagatgattcagcaatcccactgctgggtatatatccaaaagaaaggaaatcagtgtatcaaagagatgtgtacatgcccatgtttatttcagcactacccacagtagccaagacatggaatcaatctaagtgtctatcaagtgactggataaagaaaatgtggtgtatatatatacaatggatactagtcagccataaaaaagaatgaaatcctgtcatttccagcaacatggatggaactggmagtcattatgttaatgaaataagtcagacacagaaaaaaaaatatcacgttctcataagtgggagctaaaaaagttgatcttatggaggtagagggtagaatgatggttaccagagactgggaaagggagggggtggaggggggatgaagagagattcattaatggttacaaaaatatagytaaattgaaggaataaattctatagtgtttgatagcacagctgggtgactacagttaacattaatttactgtatattccaaaatagctagtagatttgaagtgctcccaacagaaggaaataataaatgtttgaggtgatggatatcctaattatcctgatttgatcattacacatcgtatgcatgtatcaaaatatcatatgtaccccataaatatgtacaattattatgtatcaataaaaaataaaaaaaaacaattcagaagtccataaacttggatggaataaaaaaaagtcaactttattttcaaaaaactctcactgaaatctaattttatgaatgtagaaaataaatctttgtagtaccagccagcagctgtaacactgtcatcaatagaaaacaccatcaattaatattttcatatcacattatagttgttacagacatcttaaaatatcacttacaattatgggagctgttaaacttgccaaaaaatcatgctttttaatgtattagtaaagaaacactgtattgtattaatacagaaacacatactactagatcatcacacgtttctttgaatatagtagtgtcccccacacagcaccaaatgtgattatacagtttattcctatccatagatatacctatgataaagtttaatttataaatttgcacaggaagagattaacaacaaaataggacaattatattgtaataaaagttatgtgaatatggtcyttctgtctcatacacaaagtatcttattgtacttattttcagaccaggttgaccttgggtaactgaaatcacagaaattgaaactgcagttaaggggggaccactgtattttgataactatagtttatattttattttatgcatttacaaatattatcagacaagatccaaaggcttcaccaaactgccaaaaaagctaatggcacataaaaagcttaaggagtcctgatttaatcagtcattcaatgaacatgacatccttcctggaaccatctcctgttctagcttcctcacattatgttgctctgcttctccttgagatcttccattggttccacttcctattcttgcttcctgtatgaagatgtaacccaaagctcaatccttcaccctaaattgtttttataccccctcttttacaaacctcagctaccttcgtggctgattcaaacatcacctcaaaggtgactctcaaatctgcttttcctaatcttttttctctaacttcaatcttggatcttaaactccctgctgtgcctagtaaacagaataatatgccacccagagtcagctgggttcaaatcccagttctgctacttactaaaggtgtgacmttaggtaaatattacctgctatggtttgaatctctcctccaaaactcttgttgaaaataattgccattttgacagttttaagaagtgggacctttaagagttaattaggtcatgagggctctgctctcatgaatggattaatgctactaatgtaggtatgggttcccatttaaaaggggacattctgaggccgggcacagtggctcacacctgtaatcccagcactttgggaggccgaggcaggtggatcatgaggtcaggagatggagaccatcctggctaacacggtgaaaccccgtccctactaaaaatacaaaaaattagccaggcttggtggcgggcacctgtagtcctagctacttgggaggctgaggcaggagaatggtgtgaacccgggaggaggagcttgcagtgagycaagattgcactactgcactccagtctgggcgacagagcgagactccgcctcaaaacaaacaaacaaacaaagggtacattctggcctctattctctctccatctcatgtgcttgtttgcctttctgccgtgggatgatgcagcacaaggctctcaccagatgccaatgccatgctcttggacttccaagcaactggaactgagccaaataaactactgtttataaattacccagtctgtggtattctgtgatagcatcagaaaacagactaagacgtcctttgcttctgttgtttcatttgaaaactgagggtgataatattagtattgactttatagggttataaggattaaaagagttactacatgtactcattgcagtacctgacacattttaactactcaataaatgttttgtatcaccaatcacatctccttccaaccccgacattttaatttgatgtttattaacatggacggtgccagccactggaagacagagtttctatctaacaacataattctgatcaagtcattagtcaaaaaatttcagtggttccccactgattccaaacttaacagcactggaaaccttctataatgtgttctctaatataaatttacctcccattttctcttctcctgctctacttcytgtagcttatgttctggccagactggactagactactctctgtgacaataacctgtgctgttctatgtctgtctttcctcacataattctaatgtctcaggtttgaaggcaataattttgtctatgattattcccctatacatggcaccccataaaacatacacatttcaatcttacctaagtcacatacttacttacacatcaattcacctccatatttgctcaatttgtgagaacctaatattggccagatactgtgctaggacctagggatattaaaaaaaaaaaaaaaagcaaagcaagaaaaagaatgcataatggccctgctctcaaaatcaaggtctagtactagagagaaacatgtaatcacataaatgccattcactgtggaaagtaaaatcataaggggaagggacaccaaagaatgagcagttagctcaacttgaacagtaacattaagcttttcagagatgttatttgggcgtacatagattggggaaaagtctactccatatagaaagtgcacatgtgtaaaacacagaggcatgaaacaaaatgatgtgtctgggaaacagttcaatacagctggaatatagggcccaagaggaagtggttagacatgaggctggaaagctaggcagactgttttggcaaacataggaatttggactttatcacatagccaataaggaataacacagagttttaaaaagagctatggccagggctatattttggaaagctctctcctggcagtattgtggcagaggcagagaggaaagtctaaagcagcactgtccaacagaacttcttgtaatgaggccgcgcgcagtggctcacgcctgtaatcccagcactttgggaggcyraggcgggcggatcacgaggtcaggaattcgagactaatttggccaacatggtgaaaccccgtgtctactaaaaatacagacactagccgggtgtggtggcaggcgcctgtaatcccagctactcgggaggctgaggcagaattgcttgaacccgggaggcagaggttgcagtaagccaagactgcgccactgcactccatcctaggccacagagcaagactccgtatcagggaaagaaaaaaacaacttcttgcaatgacacaaatgttcaataatctgtgctttcccatatgacagccactagtcacatgtggctaytgagaacttaaaatgtggctagtgtattgagrcactaaatttaaaattgtattaatttaaatccaaatagccatgtgtctagcaaataatttaggagactgttggtatagctcaggtgatagaattaggacagaagggtgagttgatggatagttaagaggcaaaattatgagtctgtaagggtgtgagaaaaggaaatcaagaacaggctcccagattacagactttgtggttaaacagccaccattactcaggacaacagaagagaaagagcaggtctagagtgtatagtgatttcatcaattttgaacatactggtgtctgagagttatcccagtgggaatatttagtagaaagtttagcttagagagctgtctgaactaaagattcagacttcagaggctttgagccatggagtcagattacctagagaagttgaacaaaattagaagcaaacaagaatcacagcaaatatcaacacataaaaaggggctaaggaagaaaaatctactgagactggagaggaacagttacacaaataggaaaagaaacaagtgagagtggtatagaagtcaagggtagagagaatgtcaggaaggaaacatgatcaaatgtcgaatgcctcagaggtcaaataaagtgagaactgtaaagtgcttcctgactttgccagttaggaggttcttggtgacatctgccagaaaagttttggtggtagcagcctgacagaggtagcttgaagagtggggatggggaaagagaatgtgacmaagaattgagatagtaaggataatttcartttcaggtcttggctgtgcaaggaagccgagagacatgagtctctaagagggcacgatattgagagggttgttatctttctgtcagcggggaaaccaagagaaaagtttaaaaaggtcaaaagggggagaagggaagacagcttccgggtaacagagaaggttgaccaggtcaatagtaaaggatttcctcaaaccgaagggaggacctctagtgaaatgagaaaggaatacacaattgacccagtttgcaggtgggaaatgggaagccagttctgcaaattggcctttctgttctgtgaagtgccatctgtcggtgaggagagattagggtctgcagcgtgaaaatctggaccatactctgggtaatcaagggagaggttatcggctaatgacaaattaaaggcttactttttagctggcaactgaatcaccataacattttatgttaccagttccaaaattttggggggaattcactcaagcttgggagaggagagatcataactttaagagtataagaggtttaaacggtccactacgarataaatagagaaggaaaagttatcagctggtaaatatcgtagaaggtagagcggtccagggactcacaggtctcactaaagaaaagtctagcgtaggttcacggcacggagagattttaaggctgcctaagactaaagccaaatacgaabtccacatctgcggtccgcaccttatctctccgcgcggcaggcgcgacgagggcgagaaactccctctccagtggtcgcaccacacgacaccagggaaggggcccctctctccagaccctcatatctccaggtccaggccccattttcctccgctgacagctcagcagcgtgcgcttccgctggattcaggccaggaccagcgaagccgcaccttacacccaccgaggaggaaacaagcctggccacccgaggctaccccgctaggccgcgggtagtgggggagggggcgctgaggcaggaggtcagcacccgggcgcgggctcccgccccacgaaawgcgcgcgctccaagccccgccgcsggagatgcggttccggtccggacgcctgcgcactacggctctccccgcagcctctggccctccttccccctcccccagtcagggcgcacccttgcgcctgcgctgtgtgtrttcctggtctgcggcagccatgctgaactcgtatggagaggcgagtgggggggacagagtcsaggacygcgggataggaagctggggatatggacaagcagcagcgttatagcgctctgggtttcgggacataggcctgggccatgcggcccccttggccccttggcgcgacccccaggaacgttcggaaagctggtcctcgtggctgggggaaaggcggggggtgggggggaagcgggcacgtgaccccggtcagccaatctgggtgctgctgacgtacgcgcgcggccccgatgctctccccacccccccagcccgttcgggaagggaggggctgggggctacgccccmtcccccagcacggcttcgttttctgggggggggttgacaccccggattacataccccgtaccaagccgagggcaactttggaggccccctggaaggctttaggatccaggtgagaaggggcccttgtggggcggagatgtcagtcaagtgcttaaccaatggtggggagtccgggaggggattcttggggttcaggaaagaatcctgagagtgggaagatttgtccttcaaaccttttacagccaatgggagcgtggagggggggcgagcgggagagggccatggggggggaggggaatggccagcctcatgcctccgtacccattggagggcaaaggggttagggggcggtgtggccccccctattccattcgtcccctgggggtacagcagccgggagccaggtgagaagggatccatcggcggccgagggaggggtgacctggcggtgggctgaggagtggtggctgtggcccctacccgtggatgtgaatgctttaggagttggccacccatgttgtgaactgaggttgttcccaggcgccaacttcctttctccccagagcctctggagggagcattgctgtgcgccctttgtgtccgcggtaggggagctccagtcgtcacaccgcaggctggaggttacgcttcgagtcgcttaccgaatttgtgtgcattcacgtggacacggcctgtggggccttttgcccctgtagggtctttactgagcacgtgtctactccaggctgkggtgcttacaagctgaaagcttgaggtctgcttaggaacagaaaccaggcccaaggtgggtgctggcagtagggggtctagacagcatggtctgagatgcgagggaggctcgggacctggaatgatttcacagctcccaaggtttcgggtttctccagggtggcctcttccatcgcctccytcatcccctcccccagtcctgaacagttctctccttgtgtactgcgggggagggaacggaaaggaggaaagagttactttcccaaattactgagtagcagtagcctccctggtgactcatgtgggggaagggaggatagaggatcgggaggcagtgattttccggaatgcagggaataaacgagagcaatgtctggctgcccttttcctaaggcctagtattttctcagcctcctaagtttttaytccatggccggccccctgatgggcctctgtcctggcctgcagagccccggtggagaaaagcagatttgggaggttgggccgctagkgggaggggaaaaggcctctgcmaagttgctgtgtcattgccctccatgctgcagccacccaracggggccgcttgtacttttggggkccagggcctgatccctggctgggggaaggggactctgctctcctgacgctcattttcccccgccctcccggggtttgccctactcggggggtcagaagacaggagattggcggccattttagacrcagtaaccgaggttggagttgaagggctactgcagaggagggagggtggcgtggttgcagctcaaggacctaggcccttacgagcccttccsgggcgagggggaatcttaycgtatatttgttcacctacgttgattatttttcccagatacgtacacaagtttgttttctccctggtagcgaagaaaggggaaacgggggaggggacgccccaccaaagcccaggttttctcgggtgggggagatcctttcactctcttgtaagggggcggggacggccccagagatgctctggagatcctgactctgggctctggttgattcacagagtctgcacccttatttagataaccaagttaggaggaagacttaagagtaagttggggggagggggcgaaactgagctcccaaaatggctcctgcccctcctcggaggcggacggccggggggaggggaggaggggaggagggggagggctagtctgagccgcagccgccgcctcctccgctcgccctcctccctggcgctgaccgatggaccagccgctccgtggggaggactccggaccctggtggggggssgggggggttctttcgcccccgtggcggagggcccctgagaggcggatacgggtgtgcctttgggggtgatgtggcgtgtggggggaaaggtccgagctcgcctggmrggggagggtttttcccttaagtcatccctcccaggacttgctttttctgctctgagccggacgccggaatggagtttgaggaagaggtgaggtgtgttgcattgtatagggtagatggatgcgtttggagattttaatcccacttttagggttgccgaggatttttcgaacgagcagaaatgtattggtaactgtaggtgtgagtggggagggattagaaaggtgcttggacgtgcaaatttgggagacgtattttagcttttgtggtctttgggactaaacagtagtaaataatgttttgctcgtctttccatcgtttggcttgagggagggagtggagtattataagactctggcaacactgttttagactgtggggcatgggaacgttagatcccctcatcgccgttctgaagcccgtagctgttcgccatagaggagcaggccgcggcttctaagatggcgtctttttcctcgtttcagattcttcgctgctgctgccttaccgccgagaaccaccacccgccaggcgtcttgcggccacacccctggcgggttcaggcaggctacgcccacgcgacccctcccgtttccctgctttggccaatggaggagctacgaatggcacgacctgctcgagcttggcagtctccagttgggctgtgcatggaagcttgggaagactttgttggaaggggaggcggggagagagtgctggaggctctggggcgatggcttccgcacctcttccaaccaccctctttccctggagtcggcggaccacagctcagccaattggcttggagatgtggcgggttgccacttccctgtgggtctctgcggcactcttcygcctggtgactgacaccttggaaatgaagtttatgacgtcatcgytgcggctggccaatagaaaaagctcccgcggagagrtgttccttccccttcgactcagcttcttcacccgcgtgagcgagcgcgcgcgcgcggagggggtggggaaaakctcaagcagggtggcgcgcatgagcggcgaagctcctcctccccgcctatatataaagggctggcgcggggctcggcggcgccatttcgtgctggagtggagcagcctctagaacgagctggargattctgcctaccgatacagagccttcgagtcgtccggggccgccattacaatccacctccatccgcttggaaatggccttcgtcccggcctatgactggtcccagcgggcagtacagaccccytagaagcccctggagctcccctttttcgggccccgcccaatcctcggagtctgtccaccccctctactccgccctcaagaggatttcaaagatggaggcggcggctccctaaaccactttkcgtgttcatccgcctccatccgagatcgaaacgggacctcgtcggccccgtaggrgcccgacaagaagagggaatccctgcagaccaacagcgggctatattgacgacggtgtctgagatcggggaccgtcttttgaagagtcagtccctccttagttgcccgcctcagctgaggccgccgccattttcttgctgtccgccgtctgcagagcgcgccaagctgcccggagctctccgagaggccccaaagagactgctttcgtgccggccaggcagggggtttgtcgcctggaggcccaagaggaacggcctccccccaacttagcgggttatgctggaccgggcggtgagggraacygaggccacccggactttccgcggctgagggcagcgccggttccttgcggtcaagatgctgcaaaacgtgactccccacaataagtacgtttccgcgagccgcgtgtgggaaggggatgttgcagggcggcggcacaggggtgtggggcgccgtgttgggagtactgagcggccccggcgcgcygctsttgcggygcagctgtcgactcggtcgcgcggagggaattgagcgacggttttggaacggtggtggcggctcggctactgctcgtggaggggaatacaggttgtcaatttatacgctattaatgccgccgtggcccagtcttaaccgrgtcaggcagagctagtttgacggtggagtggagtgaggttgaacagcaggtttggcgtttggtgggtctggtatctagcggcggtctgttagccttttaggggggattcacggacacctctagcgccctgtagggttgccatggtgacggagcgcttaagggactggcaacsgggattcccagagaagggtaaagggatcactctcccgtgtgtgcaggttcctaatgcccagggyatgtcattaaatcttttgctttmtttgggtgggtgggttgtgtgtggtgtttgttggtgcagggattgttttttcctaacattaaaagtttgattcagggcaggagggtagagctaaggttcctagttcagctctgcgatgtaaacaatgagattcccatatgatgttttaattcttaggtggtaggaaagactgatcggaggagcaccagagggactgtaaatgaaccactgttagcgtttggtgtccggagttggtgctacagggggaactggtagtggaatcgtgttgtgtagtgggtgggtggaagggggctatcacttggtgaccttgactgttttgtacggctttttgacttccttggagtgaggagactctgatttggtgcgaataattttgagggcctggaagttacgggctgtgaagtctgacaaattcttccttgtctgaatttgtttttaagttgatatggttcttcctctgggtttctagtctatgttctgttgtggcgtgaactacccagaccttgtggaagatggtgctctctcttctatctaggtggattattctgtgtcttatcagcattttatggaattttttatagccataatttgttcttttcctccttaccggcgctcaaccaccatggcaaccaccaaacccctagtgaggaggaagcttggggtttgagtttcttaactccacccattttgcttaakccccatccccatagggctgtagttctgagatgtcgtgccttgtcagaaacaatttgggagttttttwaaatatgaaaaagaacagatagagcctatcagacttaagaaggtgggatctagatagtatactaaaaatattaataaaaggaaggcggggccagcaataaaagctccacagattgtttggatattgtttctgcttaagaagcacttggcataagcttaaccacctcactagggccagcacctggattcatcagactattgtgcagatgcactttttcctcatttggacgatattgccctaattttgttcccatctttacaggctccctggggaagggaatgcagggytgctggggctgggcccagaagcagcagcaccagggaaraggattcgaaaaccctctctcttgtatgagggctttgagagccccacaatggcttcggtgcctgctttgcaacttacccctgccaacccaccacccccggaggtgtccaatcccaaaaagccaggacgagttaccaaccagctgcaatacctacacaaggtagtgatgaaggctctgtggaaacatcagttcgcatggccattccggcagcctgtggatgctgtcaaactgggtctaccggtgagtagagacattggagccggggaggtgtgggatgagcaagaatgcgtgtgaatgggggtggtctgcctagtgtagatgctgcggcccctarggagttcccatttctcccctgtagggcagttagctaccagatttctgggtatcttggtcctttgtgattgatccgaccgcttgctgtaactatcttggcatctttccttgtgccctccatgtgtccttccttaacttttgtgccctggctccattttacagattcccacctcgggttgggagaggaccacggtggccaaaattcttagcttcttcctttccctcatgcagcccatggatagccagccccagaggtaatgtcacaggatgggaagtttccagagtgggtgggaggtgggtggttagagaaaggcagcaggggcctccctgtggatgtcaagaatctttyttatttatttatttattttgtcccacagtttaattggggccgcagtttaagtaactgttcctttgatgcatagggggkgtgtgtgtgtgtgtgtgtgtgwgwgagagtcggggatcggtagtctccctataagcatttatttttctgtggttctgacctaacatttytttatttaggattatcacaaaattataaaacagcctatggacatgggtactattaagaggagacttgaaaayaattattattgggctgcttcagagtgtatgcaagattttaataccatgttcaccaactgttacatttacaacaaggtgagtttttctgtgtgttcatttagtaggtggggagaaacagtaayttctattattgctggatatgttgtctacataaagtttaaatcctttgctactgaaggtgttatccaggtagggtagtcggagtcttaaaaacctgactctagatggtactattgaacacagtgatgtgacttcagagctctagttgaaggttatttagaacacttcatacttgggggtggtggtcctgtttcttagaaatcaccagagacctgagtagaccagggatctgttttcttgtcagctctcaagttttttcttctttcgaattttgggagacagttaggagaaagtggaaattagtagtggcctggagtaggaaattttctttaagatttgatgacaagatgactggtgggggtatggtaatggcctagggcctgaatgcctctgagaaagatggtgtgtrtctatcttctgttggcattttttaactttctttattgctgtctgtgttctcatagcccactgatgatattgtcctaatggcacaaacgctggaaaagatattcctacagaaggttgcatcaatgccacaagaagaacaagagctggtagtgaccatccctaagaacagccacaagaagggggccaagttggcaggtaggaagagtgggagttttgcaaatggacaactaaagatggggaagagaatcaaactacacttttttccttttttctagcgctccagggcagtgttaccagtgcccatcaggtgcctgccgtctcttctgtgtcacacacagccctstatactcctccacctgagatacctaccactgtcytcaacattccccacccatcagtcatttcctctccacttctcaagtccttgcactctgctggacccccgctccttgctgttactgcagctcctccagcccagccccttgccaaggtatgatctgtggatttcctctgggcagcaggraggcaagggtcttaagtaaagtgggcttggagtgacaggttccctatcttgttyctttctgcagaaaaaaggcgtaaagcggaaagcagatactaccacccctacacctacagccatcttggctcctggttctccagctagccctcctgggagtcttgagcctaaggcagcacggcttccccctatgcgtagagagagtggtcgccccatcaagcccccacgcaaagacttgcctgactctcagcaacaacaccagagctctaagaaaggaaagctttcagaacagttaaaacattgcaatggcattttgaaggagttactctctaagaagcatgctgcctatgcttggcctttctataaaccagtggatgcttctgcacttggcctgcatgactaccatgacatcattaagcaccccatggacctcagcactgtcaaggtacccactgcatggggcagatgggatgctcargcagtgatgggagcctaggtgcaaaacaataagtctccttatgtgggcacacagcagtctttggttcttggcattttacttttataaaataatagtggaacagaaggtctggtgttttgagaatttgtatttcttggagtttgaaacagtagggtggggtttctttgtcttgagaaaaatactgtctataattaagtactaatgtggcagtgttgggttaaggaagttatagggtggaaaracaggcataggccacctctctgtcacttagaaatgatttctttttctagacataaatatttcttcaacccacccaaattcctttgacttcaaacttgaaccccagggcacagatccttaaggtcatccccactgtgctctcaagagagggctcttcttgtggtgtctggggttggcagggaaaggtgagtcttcctgcctgtgcagcttctgatgctgcctccttctgcagcggaagatggagaaccgtgattaccgggatgcacaggagtttgctgctgatgtacggcttatgttctccaactgctataagtacaatcccccagatcacgatgttgtggcaatggcacgaaagctacaggtgagtggaaaggttggagtttgaaaaataaatggtatggggagttattttgtcatgtgtgctgcatagcctcaacgtgagggtctcactgttctgtacagttgtaaattggagctatatcacttggtggctgggtatgtagggcactgtttatcagcatagttttgagtttgtgcctctttstaggatgtatttgagttccgttatgccaagatgccagatgaaccactagaaccagggcctttaccagtctctactgccatgccccctggcttggycaaatcgtcttcagagtcctccagtgaggaaagtagcagtgagagctcctctgaggaagaggaggaggaagatgagkaggacgaggaggaagaagagagtgaaagctcagactcagaggaagaaagggctcatcgcttagcagaactacaggaacaggtattttgtcactyttgaaagtttttattgggtaagaggttcatgccytttgtcctcattwtttcttcttgttattttatctttatttactttttcyacttcatgttttttttcctttagcttcgggcagtacatgaacaactggctgctctgtcccagggtccaatatccaarcccaagarraaaagagagaaaaaagagaaaaagaagaaacggaaggcagagaagcatcgaggccgagctggggccgaygaagatgacaaggggcctagggcaccccgcccacctcaacctaagaagtccaagaaagcaagtggcagtgggggtggcagtgctgctttaggcccttcyggctttggaccttctggaggaagtggcaccaagtgagttagagtaggaagcagagactagtttggctatttctgtctctctgggggatgccatctctctttgcaaagataattctaaatggccagttaacagatacaataggctttgagcagtggtccccaacctttttggcaccagggaccagtttcgtggaasacagattttaccacagacagggtttgaggggatggtttttgggatgaaactgttccacctcagatcattgggccattggattcccataaggagcatgcagcctggatatgtaccatgcgcacttcacagtagggttcatgcttctatgagaatctaatgcttctgctgatgtgacaggcagtgatgcccacatgccggctgttcacctcctgcgtagcccagtaacaggccacggactggtactggtctgggggttgggacccctggctttgggagtcagggtgtttcacagctactctgacagtgaactcaaagtagccataaactagaaacatgaagatggctgtgttccaaaaagactttatttgcaaagacacgtggcgatcagatttgttctctgggccatatagtttgcctgttgctctaaatcaatgagtctagacttgtttttcatggcgtagtagttttkggttttttggtgtggttttgtgttttktttttkttkkttwgtttgttttttgttttkttttttttaaagactccaggctggagtgcagtggcgtgatctcggcttactgcaacctccacttctcgggttcaagcgattctcctgcctcagcctcccaagtagccagrattacaggcatgcgccaccacgcccagctaatttttgtatttttagtgcgcagctagtttatgtagttttagtggagacggggtttcgccatgttgggcaggctggtcttgaactcctgacctcaagtgatctgcccgccttggcctcccaaagtgctgggattacaaatctgagccactgcagctggcccatggtgtagtttggtagtgtttaagggagcagaaagacccatgtcagtatacctaaacaggtataccttgttttattgtgcttcactttacggagttttttttagatactacttttttttttagttgaagatttgtgacaaccctgtgtggagcaagtctttcaacagtttttccaacatgtttgtgtgtcacatttttagtaatattttttcattaaggtatgtacgtacattgtctttttaaagacatgttattgcctacttacagtcaagagcaaaatgctctgtttcactatacagtgtcccagtagcccacctcttacttggccattgaatggaaaaacagaagctccactctgggcaggaaataggatcactgaattataacagtgggaacatactggaagaggttaatgaagcttcttttgctgacaactctttttgcccttaggctccccaaaaaggccacaaagacagccccacctgccctgcctacaggttatgattcagaggaggaggaagagagcaggcccatgagttacgatgagaagcggcagctgagcctggacatcaacaaattacctggggagaagctgggccgagttgtgcatataatccaagccagggagccctctttacgtgattcaaacccagaagagattgagattgattttgaaacactcaagccatccacacttagagagcttgagcgctatgtcctttcctgcctacgtaagaaaccccggaagccctacagtacgtatgaaatgaggttcatctcatggttctgaggacagttgaggaaagatggtggggtctgtttgcattcaggattgtcagctcccaggataatgggatgtgttggttggcagctgacgttcaagaagggaacttgggaaccttaggggcccataataagatgcttggggcaatcttaatgtatcctgataaatttctttcattagccattaagaagcctgtgggaaagacaaaggaggaactggctttggagaaaaagcgggaattagaaaagcggttacaagatgtcagcggacagctcaattctactaaaaagcccccyaagaaaggtgagtatatactttcatgccactacagattgactccatcctgcckycttgactstcttttattgasaaatgaagattcagacttgaacgtytttaactttygaatttgttctgcagcgaatgagaaaacagagtcatcctctgcacagcaagtagcagtgtcacgccttagcgcttccagctcyagctcagattccagctcctcctcttcctcgtcgtcrtcttcagacaccagtgattcagactcaggctaaggggtcaggccagatggggcaggaaggctccgcaggaccggacccctagaccaccctgccccacctgccccttccccctttgctgtgacacttcttcatctcaccccccccygcccccctctaggagagctggctctgcagtgggggagggatgcagggacatttactgaaggagggacatggacaaaacaacattgaattcccagccccattggggagtgatctcttggacacagagccmccattcaaaatggggcagggcaagggtgggagtgtgcaaagccctgatctggagttacctgaggccayagctgccctattcacttctaagggccctgttttgagattgtttgttctaatttwttttaagctaggtaaggctggggggagggtggggccgtggtcccctcagcctccatggggagggaagaagggggagctctttttttacgttgatttttttttttctactctgttttccctttttccttccgctccatttggrgccctgggggtttcagtcatctccccatttggtcccctggactgtctttgttgattctaacttgtaaataaagaaaatattattcaagttttgagttaccttaatatttgcttttgtagtgtttcaaaaggaacatcataagaattgtcttrataattttgagggaaatattactgcagtgagaaaaggcaatagctaacctataattggattgtcttaatttttaaaccagtaggcttttgctgtgtttttaataaagtaaatatgacttttgtaaattgagtccttagaagtaatctttaggtctacaatttgctcttgtttaaatgaaaaatagtactgtggctcattcatgctttaaccaagaactcaaaattttgaggtaggctttaggtttttccctgtggcactggatgtgtgaattttctcctgagcagacttaaaatatgagaaaagggtgggaggtagccgaacataagtactttatgcattgagtttattgccttttaaaaggaaattggcctgtaatcccagcactttgggaggccgaggcgggcagatcacgaggtcaggagatcgagaccatggtgaaaccctgtctactaaaaaaaaattagctgggcgaggtggygggtacctgtagtcccagctactcgggaggctgaggcagcagaatggcgtgaactcgggaggcggggttcagtgagccgagatcgcgccactgcaytccagcctgggtggtagacactccgtctcaawaaaaaaagtaattgggcctactacattgttaaacattgttaaattttgctgccatggtcacacacaaatttacagatagtttattagtagaatactaaagagtattccaacgattaaatcacaaaactgtgctttctgcatacccccttgtcttgctaaggggagagaagggttgtataaaaagtttagggggttgggatgtktgcattctggaatttggggctttaatactggaaaagtgagacatttgcttagtatagtgtaccatagtaggaaacctggatagagacrtggaaattagaatcaggaatgtagtaaagcaaatggtttattttgctgtaaatgacaccacaaactaagtgtagggcaacaccacaaactaaatgtaggaagcaataaattttactagtgatgctcagccctctttaggaattccggctaaactggggcttgagcaacaattttcaaaagctcgggagatggtaataaaaaattaggtttgtgaaccacctgctactgtttgccaagcacttagagggaaacaaacccttgtttgggctttcttgctaacttgtgtgcaccagtgaaagctcttgagctccctttgagctctggttcccttttgagaataacagatgttgaggattcktaagtacttaatagasacgcgttgggcaataggtgatgagatacaaattaaagttctgaaaatcggagtaaatagatttaagctaagtgcatgtctatgtcarggattacatctcatttcagagggaattgaaggatttagttggattagttttgggacaaaatatagaatattttgtctgactgcagccccttctgctcatgtacttttaaggtttgttttctgtagttcggaaaaataaaagtttcaacctgacattggaggcccctgagtacttaattccctgtaaatggaacccagaccgccctaaatgctttaagagagagaagggctggctgacacaggggcttcagacctgccttaaaccaattggactagtctcttaattgactttagtttgaacttatttcaagcctgtctcacttagggattgtaattgtttcaggagtttggttgagttccatcttggttgccaaaggactttattccaaaatagcagtctccagcacaactcaaaggactagtkgagtcctgtgggcattatttccccctatgctcctctcagctcttggaatcatgggttctattgctgctgctttttccctctcccctcatgctgccatttactgccttttattgcgtccataggaagccttttgttgggttgtgggggaaggtgagagtcggtcttatttactcagtcacacatttattgagttcccttgattgccttttcagcaaactgttaggcctgtagacctggacgttgccaagccagagggtataaggtgaagataagacaaggtcttatcatggagtttgcttagcacgaatagggtgcaattattaaccatcatggtgtggtaattatactgattgaatccaagatataggcatgacttggtcttcacagaccatccttattgtgcacccatatgtggaccccagttccagcctgcctgtaaccttccccaaagtcctgctcttaggttcactcgggactaccttgattggaaggccctgcttccatgagtgaccagcatgaaggactcccaggacaaggaccagaggtgactggtgttactctggggcttagtgcaagactggaggaagattttcctgagcaattagagagtggctgtaatggagagctgggaaggagatgtgggaatggtagcatggaactaatgtgttgtcaccatgatttcattttttcctgggtcatcaccctaaagatactcacaaaatcccacyagctggtctccagcactgaatgagacgacagcttcttgctctcaatttatattctaggatcggggaaaggggcagcattagacaactagtcacacgatttttaacaaaaataagtaattctaacaggacaatgtgcagaggtctagcaagaatttagaaaagagggttctctggtctaagctgagagctattcagatatctcagaacgatgagttccttcctgtttgtaaggggtggatgggtgggagcagggagtagtgaacattgccagcagaagaaacagcaactgagaaggtaactaggtgatgctgaagcagcaaggatgaaggtgagtgctttgagatgctttgaatttacatctcaaagactaatagctaacatttattgagcacttactgtgtcccatgcactgtgctaaataaaaacttaccctgtaaactcatttggtcctcactataatcctgtgaggtacatcttgtctgcatttaacagataaagaaatgaggcacagagagattagtcaatttgcccaacatcaccacattgtcagtgagcactggaggtgggttttgaaaccaggcgatctggcttcagggtccacatttataactactgcactagacttccagtgctgtgggccagtagggagctaggagatagacatgctttaaggaaattgcactagggacaatcatgttagggttggtggggtgttgagagtggatagtttagaaagcaattgcagcagttaatcccagccagtgagaatagtggtgtagaagagaaaggcagcaatgtagatgaagaaatgtagatagatttgagagctatgtaggagttaaaatagatgggacttattctcaaaaggttcttgtctccacacrttaaaggaacagcagagcacacgtgcacttgcagacatacagctctcagagtccctagcacagagctttccaatagtggaagcttgatattttgttgactaaaggagtgccacctggctgactggcagatttgaatggagctccctccagcatggcttgccraaggggcaggggttctgaggctcttgtagactgccrctgaaggtatttggcgccacctgttgggygtgttacccacgattgcctcctgaatctattgtcatttttgtgtcctgcccccgaggttaggtggttcttcccttcttactttcctaaacttcaactcttaaaatgtgagccttcatttttatgacccagagggtcacaaaagaaggagattaggcctttttagtccttatctccctttacctctgaagcatcccatggggcttccctagcattttattttatattgatttatttatttatttttaagaaagaggatttctgtcacccaggctggagtgcagtggtgtgatcatagctcactgtagcttcgaccttctgggctcaagtaatgctcttgcctcagcctcctgagtagctgggattacaggcatgagccaccgcaccctgcatctcctgacttctttgacttgacaccacttgttcctagctctcatacttttcagacagccatttcttagtctgcttctttaaagtctctgcctctgcctcccataatatattgtccsttatgacacctttctttgtcctctttttatttgcacagtatttttaagcaagtttacccattcctctggaggcacctcccacccataaaatctgtgtctctgtttagaccttgtattagtccattctcacatggctatgaggaaatacctgagactaggtgatttataaaggaaagaggtttaattgactcacagttctgcatggctggggaggcctcaggaaacttacaatcatggcggaagacacctcttcacagggtggcaggagaatgagtgccaaagtgaagtggggaagccccttataaaaccataagatctcgtgagaactcactatcacgagaacagcatgggggaaactgcccccatatcaaaccttgagtcaaagttccaagtgcctaatgcaatgcctaatggcaaggtcccataagctygtgcacacatttttagaaaagattctacctttttccccaaacatgtccctcgcagtgagttctctaagtcagcagtccccagcttttttggcaccaaggactggttttgtggaagacaacttttctatggatggaggcggggagaatggtttccagatcaaactgttctacttcagatcaccaggcattagattctcaaaaggagtttgcaaccttccctcgcatgctcagttcacaatagggtttgcagtcctgtgagaatctaatgccrctgctgatctgacaagaggcagagcttgctcgctgctcacctcctgctgtgcaccccagttcctaccaggccacggactggtagtgttcagtggcccagaggttgggggacccctgctataaggaacaagcacttatatagagtttactatgtaccagacacttatgagcacttytgcaatttagtcttcataataatcctaagaggtaggtactcatcaccattttatacatgaggaaacagacatttagtaacagttctatagctgcctagtttcttccccttattctcccccaactccctgttcagccattgaggtctgttgagccttcctctgtcccttctctcagtgcccctcatcagcctggactctcacacgactctgtcactagtccatgtctttcagctatactgtgttgtttcagggcccatcactcacctctcccttcatgccctgccctatccccaccacaccagtgaagacctcccttcctgggttatcatcagacctgtcacttgcagtgaggcctcacctcaactaaggaggtcaaaataagaataacctctcatgtgagtaagaggaactcatcatccttgccaagctttccaaccaaccccaaacttcaagtatttttgtgtccttgtacagtamgtgaatatttctacataataaaatatttctttcatctctttgccaaatgaggacmttgctcattttgtcagacaagctaatgtttgatttgagattgaaggagaaaagggatttattctccagcgataagcatttttgctggtgtttgacaaacaaaaaaagagcagttcttctattagctgccactgtcagacctcatggagtcagttgctattctaattgctgagactatgagaaggtaacactggttaattgatgaatactttcccctcttctgcccctgcagaagatgtgttggaactggcttctctatgaaggcaggttgtagagacaatgacagttcttccaagaaagacagttattaccttgtcttcctgcatggttttgtttctcacccagagttcctgcaaaaaaaaaaaaaaaaagagacattttgcagtttcatctaccgattttctcctctctctc

SEQ ID NO: 1596 - DNA, 17613 bp, Homo sapiens
  misc_feature (1)...(17613): n = A,T,C or G, or insertion/deletion polymorphism (see Tables 1-2)
tctccttcctcagtctcctgagtagctgggattacaggcacacgccaccatgcacagctaatttttttgtatttttagtagagatgggggtttcaccacattggccaggctggtcttgaactcctgacctcaggtgatctgcccgccttggcctcccaaagtgctggaattacaggcgtgagccaacatgcccagccttcgatgaattgttttattcttactactctgtaatcacctgtctttaactgttactgttgtttactttaaatgttatgtgattattagttataattcagttaaatatgacaaatataaacaagcaattgaatatatgcatgtggaagagcatctatctttcacataactaaaaaatacataggaaagtttttgtggcacaaattgtccaagggaatagtgtgattctatcaccaacaaatgataggataatagacattaggcataagtagcagttactgtgctcattagttagtggtagattctacccatttattttctgtcactgtggttttctgctttaggtatgcctcttgaaagcagaacatagtcgtgttttgttttcttatttattctctgtcttttgatagatcaagcaaatttatttaaattcatgaacatttctgataacattgaacttgcttttactgtcttattaaaattttgctagttatcactctcttttcactctttttttgctttgagattaaagtgataagttctttttattcatttctccatctgtttttttttttttttttttttttgagacggagtctcgctctgtcgcccaggctggagtgcgatctcagctcacggcaagctccgcctcctgggttcacgccattctcctgcctcagcctcccgagtagctgggactacaggcgcctgccaccacgcccagctaattttttgtatttttaatagagacggggtttcaccgtgttagccaggatggtctccatctcctgacctcatgatccacccgcctcggcctcccaaagtgctgggattacaggcgtgagacacggagcccagcctcatttctccatctattctaagtttctatttttatataacaaatcattccccaaattgcaggcttaaaacagcagtttattacttttttcctcacgattctgtgaattgcctggacttagtggatagtctctcattgtggtatttcatgtagttgccatcagataagggatgggaccacagtcatctgaaggctcaaatgggatgaacatctacaatgatccaactcaatggctgacatagggaggattccctctttttctactgattggaatagtttcagaaggaatggtaccagctcctccttgtaactctggtagaattcggctgtgattccgtctggtcctggactttttttggttggtaggctattaattattgcctcaatttcagagcctgttagtggtatactcagggattcaaattcttcctggtttagtcttgggagggtgtatgtgtcgaggaatgtatccatttcttctagattttctagtttatttgcatagaggtgtttatagttttctctgatggtagtttgtatttctgtggaatcagtggtgatatcccctttatcattttttggggggtctatttgatttttctctcttttcttctttattagtcttgctactggtctatcaattttgttgatcttttcaaaaaaaccaactcctggattcatggatttcttgaagggtgttttgtgtctctatctccttcaattctgctctgatcttagttgtttcttgctgtctgctagcttttgaatgtgttggagagcagtttctcataaaagcttgtggattcaactgtaaaagtggcaatccactctgactcccctctccactgcagagagctttcttctttcacttattaaacttttgctccaacctcacccttttgtgtccacactccttaattttcttggtcatgagaccatgagctcagataacaccttagtaataatatcaatgacccggacctgttttggtaacaccagctctggggccaggacacaggggcactctcaggcagaagactgaaatctgtgcaagtggtatacaaatttatcccttcatacacaaatctcaggccagtctctctcttggacttctaaaattttacattcattgtgatgagaatcaacatttttggttcatttcaaaggacaggctcaagttttgccaatgctaatatggctcagcagaaaaatgcatgtggcttgtattaagaaagcacataaaggatctacattgactgggttttcataatcacaaaaaacgaataaatttgtatgagtatctttatatgaaggcaaggaggaaaacaggtgaatggaagcctacgtaaatgtgcttatgatttaaaacaaacttatttcctcaggaaaaatatatttttcacctcacctgttaaagtcttaggaaagcttaaccttgataatctcctaataacagaacttatgtttcttttctgaacctcattccttctcatattgtaataatgaaatgaataaatgaatagcaagtgagtagtggtgcacactaaactctgagtactgactgccttctattccacttaatacctttataagaacattgttatgtacctaagtcatgtcatctataaaactaaggtaatgataacaatcatatgtccctaatataatggttttgatgattaagtggaacatagtaaatgtttaaaaatgttttctattataaccaatttggctaggataggtggaaagaatagaaatatgataattaattgtgaaatgtataatatatattaataggtcatcaacatcaaattaaaaaatatagatgattaccatgatagtgaaaccaaagtttttagacaagtcaaagcaaagttgaagtctcagagaccattgtgtttatttgctaactgtattatcagactgcttagttgatacagtgaatacaataattcttccaatgtacataaactgccagacaagcaactcaatgcaattcactcactctcggagaagtttatcccctctgccaatgttcatctttcctggcaaaccatccttcagtattccaggcaaactagagcaaggtgaagttgaagaagatcctactttatattccattcagagagcttccgggtcttcaaaaaagatttagtcatgtgggtgtgaaagagctgagtcatgaaatttggaccttattrtaagtccagaaggaaaaacaaggggtttgaagcacaagggtgatatgatctaatttctacttttaaatgatcactctgattgtcgtgagggaactgatatgggatgtactgggggaagaatgttaccaggaccaggtcgaggctgttaaagacctccaggagagagcaytgtgggcygaacaacaagcttctagtaaagatcatgcaagtggacacatttgagatgtattttgaaggtggaagaaattagataagctaatgggtagtgcctggagggagtgaggatttttgaaccactaggtaaacacctgtgagtaacagagaaaaagttgggatgtgttatgaaagatgaatcctaaaatttcatatgttgaagactgatgcttcaggacctcagaatgtgaacatccatagtagaagggaattgtgttgttgacggctgccacccactctaggtgcccaagctcctgcagcagtcctacttctccctttcacccacactcactcccagacagtgtccctttcagctcttccatcaccccttcttttgatttggctggtgagagcatagctggtatttatactttcttgatatgctagtctcttttgctgattgttgacattggagaaggtcatggaagggacctgagctgagcracctttaggagcatttcctgttctyttcctgtactctgctgccaaggagaaatctgtctttcaccaggcttgcagctttctccgttacccacatcatcaggcaatatctgtctggcacccctctttgttccctttctctggccttcctttttgacatgatggttgacctgaaatcaccaaggcaggactgctcatctccaggtctaatggaaaacagtatctggtgaaaccaaagaaaataatyccagtaacccaytgggagctgcttggcttaagcacctaccctgtgcctaagatacaacccatcaagcccagctaaaactgatccagtttccacagggccagagaagaattgccaattaagaatgcattcccacttcaaatatgtctatatttatttcagggaaaatatcagtctgcctgggtcccttatgagaacattgttgtctgtagaaaaatctaatctattaggaagccttcttgttttgttatctgcaactcttcagaagggccagaccagaccctcgtatgcacagtacaggatccacccatgcacatctgtctagggccttgtctttatgattttctgtcacatggcctctcagccatgcctccaaccaagctatcctcaaataaacactagccgtgcacaaaaagtgaaaaattacacaaggcctacacaaggtctgaaatggaaagtgcagctggtgataccgagtagtatattttatgaattgaggaacagggaatttctaggtatcacagagcaatcagcagctgagaagaggagtaccaatccaggaccctggaargatttttcagaaacttaatagtttattgtccaattgtagagacaaaaatgaaaataaagatagtgaggagtaccatacaccattgcttagaagattaaataaatgtcatctcccacaagtcatgtggggagaaaaaaactatataggaagaaaattacaaacgacaaggtagtctcagcatataaaatatcaacaaatgaatgtaagaaagagaatgagaaagaattagtattagaatatcatagaaaaaatcatctttgtgaaagaaaactctgatgaaactggtgacataaatactgagtaaaaaacagaagaccaatcaaggcatttgaggcttgaacaggcattacaaatcatcaagttgaatatataagtatggccacttagttattagtggtgaagactacggtatttgttagaagaaataaagtagatgatgaattctatagaatattctggagaaagtggaggtcttagctacatgacatcgtgtggctcactttgggaaccatgtttcagtttgtttaggtctagaaattccttggtggtttctgtgttcagttttgctttaataatccctaaagatattttttaaaatacaaattttttagctttcctgtattgtacagcaccaacgcttgcctgagtgtagtgagattcacagagtttggaaatttcctgtagcatgaggaggctgcggggcagccttctgtcayctatgtgtacccagcagtgtgctgtcctcacacaactcacggataagcagaaagcatctctattacatgaaaaatttagctaaatatacaaatatccatgcacacacatcatgagagatggaaataggctatcaaaagagtcagacatattgaccgtcttcactgttagctgtaggattgctgcccaaccccctgacacacccacacaaactcacatacacasaaatgaaaagcacagtggaaagcagaatagcagtctttccaaacagattgaaaaacaaatgatgtctaaagttcaatcctgacactgtgctgattgcttggacacagttccgtcaaaacatttgtccaagtcatagttgtaccttttagaaattagccacaaacaayatcctccccaacccttcctgctaggctagagtcccaraagaaatgagggatacacttgacctgaagtaagcaaagcagaacccagtctctgaggcgaggaggcccacctggtagggagctcaaatgcgccattgtcctgcttgtctttataaagggagctgacacgtttctcccagcataaagttgggagtgacaccagagccttctgcaagatgcttctrattctsctgtcagtggccctgctggccttcagctcagctcaggacttagatgaaggtaagccgaattgggggaagatattgtgactctgattggggtttacgggcgaatgctatagagggggaaagtggagggaagagaggaggatgagaaaacagataggactgaagagttctcatgccaaggatcagaagacctgttgtgccttcattcctcatcaagacctcataatttattgattgcacaaatagaacccaataaagaatttgtaccgggggagtgagagagtgagatttgcatttatagagacatgggactgctgggaaggatrtggagaatgcaagacagattcagggaagtgcagctgtgaagatmctatactgatcccagtagacagggatgatggtggccttgctggacagtggatgagyatccatgaagkagataaacacatgtcagagctattgctnaggcagagaattgggtaaacacttgcctctgtctacatagagttagagaatcaccagagtgaaatattgtcatttttttctctcctgcatgtagtattttaatgtgctgggacgggcatttgtaagattgtatctaagtggctatgtctggtggctcctgttgagaaagcttgcaaacataaacaacatatttacagatgaaagagggcagaaggatccccaaatatttcattgaaatactcaagagccctttaactaaataagcactaaggcttaaggaatcatgagaggacaaacaggggcccttctatgttgagttcctggttgacrctcagtgtagtaacaatcctgctttcccttacatcttcttccacttccggtagcatcagagagtggctgatgagatctcaaaggggatgcacagggtgtgatcagaggtcctttatcctcgtagaacactatgagctctgaatgattcatgcagtaacttttcccatcatcctgtacttcttttctagatgtcagccaagaagacgttcccttggtaatatcaggtaaatcccaataaattctcagtaaactctgtctccatttttccctgaaaaattgatcagttctccagtgtcttcttatcatccttgtcaggaattggctaatatcagtgccccagagatataaacagttttctcccaaccttgattctggggaccatgagtaaagaaatttgatttttcaccaccctaatgtggattaagaggagttctaattaggaagccttgggaaggggggaggttgggagttgagaggcaggtcaggsagagaggggccggccgtgtggtgaagacagagagrtatgaagacaggagggttttccagcatgagctcagctcttcttgtttcaactcacacagatggaggagactctgagcagttcatagatgaggagcgtcagggaccacctttgggaggacagcaatctcaaccctctgctggtgatgggaaccagaatgatggccctcagcagggaccaccccaacaaggaggccagcagcaacaaggtccaccacctcctcagggaaagccacaaggaccaccccaacagggaggccatccccctcctcctcaaggaaggccacaaggaccaccccaacagggaggccatccccgtcctcctcgaggaaggccacaaggaccaccccaacagggaggccatcagcaaggtcctcccccacctcctcctggaaagccccagggaccacctccccaagggggccgcccacaaggacctccacaggggcagtctcctcagtaatctaggattcaatgayaggtatgattccagtttattatccatcaaaggctccaactgctacagttctccaacttcattgtgccagtgaatctattgaaaagctgttaatatttccgtgtcctggaacacatttctcatgagttttgttcaaatattctgggataaggtagcaagatcttgtttttaaacaatctcttgaaggcaattccaattttgagaatcactatcttcaaattacctctcttaaatagggttgggaatgaggacatagaatcatgttctccctttggcactctgtttcctttcctcaaactcaaagactcccatttatttaaagttttacctgaacactccttgttcaggacaggctcagtcctgcctcacactagcatttcaagtccagtattcctgctaaatggtccttggacttttagctgttaaatggtatctcattttttaaaacacatttcacatttaaagtcatacatgcttaagctaacaaaaactaatctcactgaatagacatgtaccaagctaaatagcaattcatttctcctcccctctacccttaccaaaactcccactttttactgtttggaaactcctctttgaaatatttattgctacataactatatataattttcccaccactaataccacactttatattcagttctgtgtcttacttattggaaaaatttatttcttagctttcacatgagtttatttagatctcttcagtgtttattggttagtttttttttttacaattatatatgatgctattgtttggtttttccrtaatttacttaaccaatccttgtcactgaacattaaggctgctttcacactgtccctattacaggatatgttgcagtccccatctttctgaaaataacccttaacgtatccaacagccacaaagcatgaacaacctaacaataatcgtttttcgtcctcatctaagcaacagtttaaagcacattacgtgcaatggcatagaaagtgtgaacaaagaaaatgatattaaggaggggggctgtagaagggatagagggcaaaaggatggttttgcatcttcctcaccgcagtaaaccaatgaggtattasacatttcctgccatgtcaagtcttgcctataatcttccttgtctttttcaggaagtgaataagaagatgacagtgtttcaaatgccttgaaacataatgtgatcatgctctaacttcaatataccaataaaataatcagcttgcaatttctgattatagcatctccttctgagtgtttgggactctggaatctgagacccatgttcacattgtaagaacatccaggaccccttctccttgatgtttccagcaagcttctttcctccttatccttattaagtcatctgcctggggaaggagttccactgtttctttccttctctgtcttcttagctcgaatttaaattgcacaattattttcaggtcatttcctgatagtctagtcagcttatgaatgtaagcaaaacaggaccaatgaaagaaagtcccagaagctgagagaaactttaacaagtttgagagtaacttattttgttttctaggaaagtgagtatggttctatgcctgtattccccagaagccactagacctattttcccctattttatcactgatcagttctgtccctgcctatgattcttaccattcttaagaaaacctgaatggatttcatcaaggcggcagcataatttgaagggcaattgcgtgtgaaaattgatgtgacttgatttacacaatagtcagaaaacattttagaaattgatgactttataatgcaaccaggagtattgaaaaaaaagtaagcaatgagctcaaataattaaaaaagagagacaaaatacacttgggagaacagaaataagaattaatgaaaatttaaaagattaaatgaatgagaagaaatgattcataaattttgaactaacagtaataacttcttgaaaatccaataaaattggcaaaagattgtgaaaattctggaagaataagggaaacagataatcttcagagtaatcaggtaaagcttaaacaagtgttttaaaagatgagtttttcctacattctgaaaagcaaacatgaaaaactgaacacagtttttacagatayacaatatggagtgacttatatacaaaatgaccttaaaaatatattaaactcattatagtagttaatatctaagtaaaatatgatgaaatttaatagagaattcactcctcccaaaagcaccttcatggaagattcctcattaacaggcagtcctttagtatgctgatttatacaaaatgctgaaaagaagagaaataccccaagttcttgaaaaaaaattttttgatatgactactctaacagtaataactataaatctcactttaaataatttaaaacaaattaaagtgatatatgagttaaatgaccaagcagacttgattcyaggaatgttaaggaatgtycattatttgttttggataatgaagtcagcagaggaaaaaaaaatatgaccatctcaaaagatgccaacgttgtctttgataatatttaatatattttttaaaaaacaattcttgtaaaatacttttttgattagccttctgaccatgattaaaatggtgtacctcaaagtagctgctaaccttaygtgtatctgcaacaccctgaaaaattatctaatraaaaggcacaaagaaaaagcttgtcaatgttgtggataattagraagtgaataattttatttaatattagataaacaagcacataacagagatacatatattcaaatggaaggastaaaattaccaccacatgcagatctgtttttctgtccagaaaataacaagagattctactcaggtaaaaaaggaaaggaaggaaaaccattgtaattaaaataaaatttaatacaatagccgtttattaattcaacttctaaagaatctttgtgattacacaatgaccagctagtaaatataataagaaaatgattattcacaaaggaaccaaaaggcctagtcttcgaatttttaatgccattgtgatagcaagcatctgattattttactctaagttatttccacttctgattttaagaacagcttctttcccagggatgggttccccctagtgatgtattctcttcaccacaagagtttgcagctctggctttctttctgctcatctgtaaagataactacagctcctctataaaccatctcaccattattaccgaaatcagacaaattctggagatagtcaaagctgtgaggattcgaagatctctttcacatcttgacccagtcaattccgttcaccagtgttatgaatccattccccaaaattccaattaggaattatatatttattattataatgaggatactatacaaggcatttagcatggctgcaaagagagagctccaatgtctaaatgcaacgctgacaatttcttcatctatcacatgtacctgttatacatacttattaattggatgtgcagttaatttcttcctttaaaaaaaaaactataggctcaatatgaaagtagaaagcactaaggtgtactaatgaatgggcacatagcttttttcacaaaaagattattttgccccagacagctatctgcattctgatccagatactgtatgttcttaacataaagtgaaatttctcatacttcatgatgaaagaaaaaactgaattctcattgttaataaacaaataaagacaattctctgcatcattgtgcatgtttgctttatctaatctcttcacaatttgcttattaattttaattgttatcaattgcattaaaattcaatggatagaagtataacatatagcaaatatgtaaattagtagatggagtatattgagcactaaaatcatctccactgaggaatgctgagggaagactgaggggatattttcatagtttatccaaagctcttataattcaaagcattgaaatttactgaatgaatccagaggagccataactcctgaatgctgagtgctgataatttacatttatttatcaattaattgtttgcaagttcccgtatacacacactttgcagaataaccttataggattattgtccaggaatgactgctgtctttttggcaataagaatatagggctcaggaaatcacatggattcaaaatcttcgattttctaataattaattcttgcttccttcattaatatttattaagcttatcctgacattaaaaaatattatatatcaaaatattttaaaaacataattacccttgatattctctaatacttaactgaaaatatccaggaacatttgagaaccatttacagggcttatgaaaactgatagaactctatattaatcccacacagcagcctctttgttaaagccagatagggacaatattgagaatgcagaggaacatctgcagagcatgaattgtcctcattttgtacttctcctctactcagtaatacccactcccctagagttatcaaaggttgggttttattcagcttccccacacctctgctgagcaacatctgttctatggctgttaaatcttactccaaagtaagtaagtataggtttgctaaacaacacggtggagttaaatcccaatatattcttatttcttcaagaaaatttttaaatcaatagagagcaataaactacatcagcaaagatctgtaatgttgtctatatgatcctcgaatttggagggatccagattgaggagttaagcaggcaaaaatgggaaattttaagaaaaaactttcaaggataggagcgccaacacatgacccaggcagaggtaggatggacattacaggcttggcatcttccaggatattgagctgaatctgaggaacacaccaattcctacaagaatgaaaatggggtaatggagtaggctctgaaactgaattttcatggggcattcgatgatgaagcagaacctaggctccaggaaagctagaactcacttcagaggagctctctgctattgctctcctatccctcccaccaccccgcccccacacacatacacacacccctgcagctttcttcccttaaaaacttactactggggaagacaaaccagtaaggtagataagacaacaagaattcctacatattttattccagtaaacataaggcccaggctaagatcaaaaaataagaataggaaataataatatttgattcttccaaagttgcaaagagaagctttctaagaatgcatacttatgtgcagttttcctcctgarttgtttctaatatgccacttgaggtatacttgacatgcaataagttgtacagatataaagtgtacaatttcatgagtgtctcaccatgtgatactcatcacatgtgaaaccatcactataatcaggtaacaaacatatatagtacccccaaaactttcctttatgttcctgtgttattcctccaacttaccactgcccattctttatcaaacccccagttaccaggcaaccatggatctgctttcagtcactatagattactttccatattctagaatggtatataaatggaatcatacatcattgtgttttctctgtgcccacagatgcctgtttcttcctctttttataaagacaccagtcctattgtactrcggcctcactgtatggcctaatttaaccttaactacctacttaaaagccttatatccaaatacagtcacattgagagtgtgggcttcaacacatggattttggagacaaacaagtcagtccataacagtctttctgaagcagattggttattagcattttcagtaaggasgtatgtttagtaaacagccctcatctttttttaaggggagaggggaatgttattatttaattcaaaccccagaacaaatttttagcaaagaattcaggattacggttacattccttagcccttgaaaaaatgaatcaactgtcttctggcatacagttctttgacacaatttttcatgttattcaaactgggattatcttccccttttggagattacctctcactaccttgcagctgctttctgaattcccatttgcctctaaggttgcaattttatttctctctctctctctctctctctctstgtgtgtgtgtgtgcgtgcgtgtgtatgaatatgtatattgtattttattaaatctagaatgcatagactagaagacatgtcattgttttatgtaccaccattaacaagtatcattattttaattggtcagaggagagggaaaatatgatcatcttaataaacagcaaaaaatttgatagtttttaacagagattttattacaatactatacacaggaagataggaaacaaatattctccctgaakaatatttttaaaagaatttatctcaaagctagagtcagtattacgtttattgttaaaacactagaaaacactccatttgcaaagacagcagttacgatcaggattacttaacactttgaatgttcaaaccatttcattatacaactgataccaaaaaagaattacaagtagtaaaatggagaagtaaaataatcattataagtcactatatgcagatgatataattttctatctgcaaagccaagagaatgagcaaagcaaatgtggtagtttagtaaggcagctggcttctaattcaacaaacgaagcaaattasttttttgcatacacgctaatcaggtactaaatattatacaaaaawtaaaaacacttaatataggtactaaaattccatattcttttatgtactttatctaccagattgagatgtaagtttaagaagcctatttttagtaactgtgtcacatacatacatacacacatgtattttatacattataggttttctcatttaaaaatctcaaaaaaggtgaatgattgatacaaaatctatattatctgtttgtataagaactctttatagtattcgcattcttctctgtatggtaatatacatactttcatatatcctaatttgtgatatgtttggatggtgttgattccaagcayatctttgtaaaattcacaaagttatacacaatgaaagaatcttaaggaagtataaatttatataacatacaagaatttcttaggagctattttttttctaatatattcaagatgattctctaaattctttgtgacctgagggctccccatctttgaacatgtacctcagccacagtagcactgacagagaggcctgtctcagcttcttgtttccaagaatcagaacacatgagtgacatgaaggataagccattcccatcacctgggaaagaataattagattttcctccaacctttcagaggtccaaactgatatgaaaaaagacagagagaaaatggcatagagtaggaagaaagtgatcacacttttaactcctctgtgggctttggtgctggcgtctccggatattttgacagtgtgctgcatcttcttgcgatgtttccacatggagaagatgargagaagaaacattgccagggacaaagtaaagggtatgaaaatgaacacagtgctggttaatacaataagactggaaaatcrtgtaaagttacttgaatcagaactgcaagtcttgtttcttctgtatccattgatactggcatttatatggatgtttatcagtgcaatatttaaaaacaagaagaccgaagtcacaagaagcagcaccaaaaccacctttttaacyctccactttaggtagagaaaaayagagttagaaaaattggctatcttgagaaaataaaaagtaccgaggcctgtagctaaccagacactaaaatgattgatcactgtccagatattagtaagcattctgaacattttttcagtggcaaataaagctgggaaaaacacagacacacaccagcttccgaatattaaccaaaccaggctaattcgagagattgccaaagcagtgaggatccgatcaaccgaagagatctttctwcccttgacccagtcaatacagttcaccagtgctatgaaactatttcctaaatttccaattataaattccacaattaaaacgaatgtaaatatgctctttatgacaccacccattgcctgtaagagcatgccccaatgtctaatatcactgctgaagacttyttaatgcattcatctaaaatgctatgtatatctgattcttgaaaattcaataatatattccctttaaaaagggaatgttaaaccagcaaccatccagatttgctaatggctgggtttaaagctctcttcataaaaatctctgtatttccccagacagctcagctgagcttcatccagatgctgtgtgccttatacacagtaggctgaagtcttttgtagctggtgagaaaggaaacactgaattctcatttgtaaacatgcaaataaggacatatttattttcattggtttgtgtgttttttttttttttttttgtcttatctacatacttcagtctgtcaaattgagttctggggaagtatcattacaaaaattggtatatgaaactttgtaagcactgagaatttttacatacttccgtgtttgggtggagaaaaatggggagatgatggtgaaagtttacagaacctcagttagacaagaggaataagttttgttctgcttttctgagatctattgaacagcattgtgaatatggttaataatagtgtattgtacattacaaaattgctgaaaaagtaactttcaaatattctcaccataaaaaaatatttgttacctgttatctgttatatttattatcatttgaatacgttaattagtttcatttaattattccacatagtaktcataaatcataacaacacctgatacctcataaatgtatgcaagtaaaatatgtcaatttacaataaaaataaagaaartaaagaaaaatcagatggttttttaaagttaagtctgtaaagggacttattcatagttatccaaagctcctcctacaaagtagcagagttttctaataatcttgtggaagacattattcctagaatgctgggtaccaagaataatacttttctattattttactttttacaagtacatgcccagcaaacatgcgcgcacacacacaaacacacaaacgcatacatttatttgggatctaaatctttttctcttttcacttaaataattcaggctttttactttcagcatttattatgcatctagttcatgtttagtactgtgatagttttaaacacatttaaaaagacttgcaagtttatattaaatagtaatacatgtaaatattccggagactttggaaatattttctctgtacatgtgagaagaggtagaaatctatctattgtctcayaaagcagtcattgtgtttgaatgagttcatccacatggcaagaattcttattctgtgcctctcccctgcccagtagggcatattgyttcatcagcaccaaataccttcacatttttttcacatatactcactctcccagcaacatctactccatgatcctcactacagggaccaatgtagataaaggatgacatactgtctagccaagacggggaaatcagcagcatgatacagtcattcttcttcaatagctaaaaaagtaagtaaagtgagcaaagcaccaatgaaacaaattcagcaacagctaccaaacaaagtagaaaaatatgcctcataaacgtcaaagatggcagagaaagatgtaaggtgttc

SEQ ID NO: 1597 - DNA, 18475 bp, Homo sapiens
tcccagacctctggatccccagagcccaggaccctcagtccccaggatccccagaccccaggatcctcaggccccaggactcccaaaccccaagactcccagacctctggatccccataccccagaacccacagacctcagaaccctcacatcctaagacctgcatgaaggggtggcctgcccctccacacctgtgggatatctcatcaggtggaatgagagactgagaaaagaaataagacacagagacagagtatagagaaagaacagtgggcccaggggaccggcgctcagcataccaaggacctgcactggcaccagtctctgagttccctcagtatttattgattactattttcactatctcagcaagaggaatgcatcaagagagcagggtgatagtggggaggaggtcagcaagaaaacatgtgagcaaaggaatccgtgtcacaagttcaagagcaggtactgtgcctggatgtgcacgtaggccagatttatacttctctccacccaaacatctcagccgagtaaagagtaacagagcagcattgctgccaatacgtctcgcctcccgccatagggcggtttttctcctatctcagaattgaacaaatgtacaatcgggttttataccgagacattcagttcccaggggcargcaggagacagaggccttcctcttagctcaactgcaagaggccttcctcttttactaatcctcctcagcacagayccttcacgggtgtcgggctggggggacgatcagatctttcccatcccacgaggccatgtttcagactatcccayggggagaaatcttggacagtacctgactttccagrgcagaggtccctgcggctttctgcagtgcattgtgcccctggttactcgagaatggagaatggcgatgacttttaccaagcacactgcctgcaaacattttattagcaaagcacatcctgcacagccctagatcccttaaaccttgattccatacaacacatatttctgtgarctcraggttggggctaaagttacagattaacagcatctcagggcaaagcaattgttcagggtatgggtcaaaatgaagttttttatgtcttccttttctacatagacacagtaacagtctgatcgctttttcttttccctacatcccagaccccaggactaccaaactccagggcccccagactgcaggacccccagatcccaagactcccagacctctggatccccagacttcagaaccaccagacccctggacccccagaccccaagactctcagacatctggatccccagacccctatacccccccaccaaacccccatatcccaagacccctagatcccaggacccccaaacctccggatcctcagactttaggacccccagacctcaggacccttagattccaggactctcagacccctggatccccagacctcagagtccccaaatctcaggaccccacagacctcagactccaaggcccccrgctcccccagacccacctccaaaactcactatcccagaccccaggcctgcctgtcccccaccacctgcagcctcgggtctggcacttcctcatttctttatttcwaagaggcctcagaactgggcgtggaggacgtgcagctgcatgaggctcactgctggctgggctcctccatccctctgctccttataaaagaggccccaagagctcccctgctccctctgctgtctactgaggacacagtgagaagacggtcatctgcaaactaggaagtgaatctgctggtgccttgatcttggacttcccagcttccggaactgttgttcataagctaccccagtttacggyatatttgttatagcagcctgaacaaacatttggagacatctgctctctacccagggctgctcccaccacagggcctttgcacatgctgttcccactcctggatgctgttccccacatcccttcctccttactccctaaggggttccttgatcatcccattgaaaagttgcttctgcggccaggctcagtggctcacgcctgtaatcccaacactctgggaggctgaggagggtggatcacctgaggtcaggaattcgggaccagcctggccaacatggtgaaaccccgtctctactaaaaatacaaaaagttaactgggcatggtcccatgcgcctgtaatcccagctacttgggaggctgaggcaggagaatcgcttgaacccgggaggtggaggttgcagtgagccgagatcgcaycactgcactccagcctgggcaacaagagcaaaactccgtttcaaataaataaataaataaataaataaataaataaataaataaaagtttcccatctcatttcctgcccttatttttctttgcagcattcccaccacctgcacttgatatattttcccgatggattctgcctgttgtctgtttccccaactacagtgagaggtggggggagggggggctgggatttttgtctgttttattcactgctgtgtctgtggttcatagtacctggtatacaacaggaacttcataaaggcttacagaggaaatgaatgagtctttccttataggttcatagagatttataatttcattttcagaactttgtggcatgctaggatggatgaactgaactgttactaatgtaaccaatcctttaagttatttcctttttttttttttccttcttcttgaggcagaggatcactctgcactctgtcaccccaggctggagtgcagtggcacgatttcagctcacttcaacctctgccttccagactcaagcgatcctcctgccttaggttcccgagtagctggaactgtaaggatgtgccaccactcccagctaatttttgtgtgtgtgtatatctatctatatatatatataaaaatttttttttttggtagacatggggtttcaccatattgcccaggctagtcttgaactcctgggctcaagcgatcctcctatcttgacctcccaaagtgctgggattacaggcatgactcactgtgccyggcccattttattttttttcatgtaacaaacaatgctgcaatgaatcactttgagcctggagcatctttttgccttctctctctctctcttttttttttttatatgaagtctcgctctgtcaccaggctggagtgctgtggcgcgatctrggcttrctgcaacctccaactccctggttcaagtgattttcctgcctcagcctcccgagtagctgggattacaggtacatgccaccacgcccagctaattttttgtatttttggtagagacagggtttcacagcgttggccaggattgtctcagtctcctgaccttgtgatccgcccacctcagcctcccaaagtgctgggattacaggtgtgagccaccacgcctgactttgccttctcaaaaaaacaaacctgcaacatacacacaacataaaattgaacattttagccaatttatttatttrttattattattttgagatggagttttgctcttgttgcccaggctggagtgcagtgccgtgatctcggctcaactgcaaactctacctcccaggctcaagtgattctcctgcctcagcctcccaagtagctgggattacaggcatgcgccaccacaccyggctaattttgtgtatttagtagagatggagtttctccacgttggtcaggctagtctcaaactctggacctcaggtgatccgcccacctcagcctcccaaagtgctgggattacaggcatgagccaccgcggccggcccagccatttattttaaattattttttagagatagggtcttgctctgctgcataggctggagtggagtggcacaatcacggctcactgcagtcacaaccttctgggctcaagggatcctcccacctcagcctctgaagtagctgggactacaggctgaagccaccatgcccagctaatttttaaattattattattattattattattattattattgagatggagtctcgctctaacgcccaaactggagtgcagtggcatgatctcagctcactgcaacctctgcctcctgggttcaagcgattctcctgcctcagcctccctagtagctgggattacaggcacgtgccaccatgcccagctaatttttgtatttttagtggagacggggtttcaccatgttggccaggctggtctggtactcctgacctcgtgatccgcccaccttggtcccccaaagtgctgggattacaggcatgagccaccacgtccaggctgagccacatttttttattcgttagtcagttcacactgtaaacatgcaaatattcaggcagggattcccagaagtggacttgctgtgtcagcaggcacatgagtttatcattccggtggcctgtgccagggtgccctccaccagtgctacaccatggacgcaccccacagcctggctggcacagaatgtcattgcattgttggatttttgccaatttgattggtgaagacaaacagtttgtgatttgcagttttcttattaagtgtgaacttttttttktttttgagacaggtctcactctgttgcccaggctggaatgcagtggagtgatcttggctcactgcagcctccacctcctgggttcaaacaattctcctgcctcagcctcctgagtagctgggactacaggcacataccaccacacctggctaatttttgtattttttaaagtagagacggggtttcaccatgatggccaggctggtctcgaactcctgggctcaagcgatctgctcacttcagcctcccaaagtgttgggattacaggtgtaagccactgcacctggcaagaatgagcatctctggacatgttgaaaagcagtttccygctttttcttcaaggtctccgttcaaagcctttgaccatttcttggagtttggcgatgtgaaggacagaggccgaaaagaggggaaaacgtgggggagtggactcccagcctcccagatcccggagaagcctctgtgcatttgacagctgtggacatggtgtcacacgcagttaaggtggcacagtgagtcgggctggcataggttgtacctggtccacctgacaccaggttcaggtgaggccttctcccagcccacccctcctcagtatcatttttgtcactactacccctccagtctgcctcaggcccccatctgcttctgggacctcagcctcctccccaagttgcccaccccagacaccaggctcactccagagggacttcttgagccagtgcccctctgcccacgcacctgccttggctccacatggacctcttcccccaccaccaattccttctatcctctccactcctaaccatgctatcccagccagctacattttcccaagctgctgggagccctcctcactgtcccctccagcatagaggtgccactgtgcaagaactcagtgggagaggcttggaggagcttggagagccaatgataggtttggggaatcttagtgaactcctactyatgcgttgaagccccaactgtaatgcctcctcctccaggaagccttccaggaccctgtctttccctctggaccttccttaactgcatgggactaggagtgtctatgtccagctctgtcctctcttaagatagctccttgaggacctggtcagggctgaggcctcttggggscccagcgtgggtgatgcttgttgaatgaataaatgactgcatgagctgggaaccagccaagctgagatcaagaagcgagttgatgaggtggcagtcggttggggtgctaatagaggacatgaagtcactgggttctagcaagagggaagcgggactctggtccacccctccctcttgccctccatccacctctggtgagaaccttgaggccctgcaagggggcggatctctgtyttcattcttcccctctgcactccacccagacaccagttcctcttccccctgagtcgctgggtgcagagccagaggaacgccagcgaccccagcagcgctgcggacggtgctggccgtggccgctgcggcccccgtgtccaggtgggccaggacgcagcctctgggcgccgtcgcttttccagcatcgcagaggcaaaagcgtggcagtgggacccaaaaggtaggactgaggctctagaacttgcacctgtgcagggactgcaaaccagacctgggaggaccctttcagcagcccccactccaccctatcccaggacttcccagcgacccgccgttctgggagataccgggagcgtgatcagggggcggggccgtttccaaggcaaccgcttatttgcatagggtcccgtcctggccaacgagggcgccccaaatgttcaggacatagaagaaggggttaactggcccggatctcctcctcgccttccaagcccgctaagcactggggttatctacccattccccagaaggggagactgaggcagcccaccagccaaaggaggcgaccagactggggctgcgttttaccatttcagaagcggcttgagctggtctgagctataataataaacactggcggtggaggcgagggcgaccacagggctgaggtcagggctaggattccggtgtctctacgtaggttgcttgaatggggggcaccctggcatggacgctgctgttgccgctgctgctgcgggagtcagacagcctagaaccgtcgtgcaccgtgtcctccgcggatgtggactggaacgcrgagttcagtgccacgtgcctgaatttcagtggcctcagcctgagcctgcctcacaaccagtctctgcgggccagcaacgtgattctccttgacctgtctgggaacggcctgcgagagcttccagtgaccttctttgcccacctgcagaagcttgaggtcctgaacgtgctacgcaaccccttgtctcgtgtggatggggcgctggccgcccgctgtgaccttgacctgcaggccgactgcaactgtgccctggagtcctggcacgacatccgccgagacaactgctctggccagaagcctctgctctgctgggacacaaccagctcccagcacaacctctctgccttcctggaggtcagctgcgcccctggcctggcctctgcaactatcggggcagtggtggtcagcgggtgcctgcttcttggacttgccatcgctggccctgtgctggcctggagactctggcgatgccgagtggccagaagccsggagctgaacaaaccctgggctgctcaggatgggcccaagcccggtttaggcttgcagccacggtacggcagccggagcgcccccaagccccaagtggccgtgmcatcctgcccctccactcccgactatgagaacatgtttgtgggccagccagcagccgagcaccagtgggatgaacaagggtaagtaagccactgagacacctgccaaagtggtgaataataaggctccacacccagatggccgaggttcaaatcccagctctgccgcttgaaggctgtgggatcttaggtgagtagctttacttctctgagcctcagtctcctcacctataaaatggggagaggactggacatggtggctcacacctgtaatcctagcactttgggaggccaaggcaggcggatcacttgaagtcaggagtttgagaccagcctgrccaacayggtgaaacscagtctstactaaaaatacaaaaattagccaggtgtggtggcgggcrcctgtggttccagctactgaggaggctgaggcargagaatckcttgaacctgggagtcagaggttgcagtgagccaagttcatgccattgcactccagcctgggtgacagagtgagactccatctcaaaaataaaatcaataaaataaagtaaaatgagggagaattacagcccccatcatagtgtgttggggtaagaattaagtgagttcccatatatgggacaaacttcccccccttatgacctgtaaacccagtttctggcggccaaggatggggagacaggaggcaactgcttgagcggagttggggctccgcggtggcggtcagcagcataggcccaggtcccatgtgacccaaggctgtctctgaacctccatttctgtctccatagagtggggacagccccccatttccccatgacacacatgagatactaaagaggtgccctacaaagtcccatcaccactagatgatttttttttttttttttttgagatggagtctggccctgtcatccaggctagagtgtagtgacacgatctcggctcactgccagctccgcctcccgggttcatgccattctcctgcctcagcctcccgagtagctgggactacaggcgcccgccaccacgccaggctaattttttgtatttttagtagagacggggtttcaccgtgttagccaggatggtctcgatctcctgacctcgtgatccgcccacctcagcctccttaagtgctgggattacaggtgtgagccaccgcgcccagccgacatttttttttgagacagtgtcattctgtcgccctggctggagtgcagtggcaccatcacagatcactgcagcctcaagctcctggcctcaagtgatcctcctgcctcagtctccagagtagttgggaccacaggcacatgccgccgcacccaactaatttttgtatttttcatagagacgggggtcttgctatatttctcaggctggtctcaaactcttggcctcaagtgatcctcatgtcttagcctcccaaagtgctggcattatgggtgtgagccaccgccaccggcttctggatgattttgctgggcttagacaaatgagttgaacttttctaggttggtgtggggtgcggtggctcatgcctataatcccagcacttttygaggccaaggcgaggtcagatcacctgtggtcaggacctcaagaccagcctgaccaacatggtggaaccctgtttctactaaaaaatacaaaaattaggccgggcacggtggctcatgcctgtaatcccaacactttgggaggccaaggcaggaggatcmcgaggtcaggagttcgagaccagcctggccaatatggtgaaaccctgtctctactaaaaatacaaaaattagccgggcatggtcgtgggtgcctgtaatcccagctacttgggaggctgaggcaagaagaatcacttgaacccaggaggtggaggttgcagtgagcccagatcgcaccactgcaccccagcctgggcgacagagcgagactccgtctcaaaaaaaaaaaaaaagaaagaaagaaagaaaaaaagaaaagaaaagcttttctaggttggaaaagggaatggagggaatttcaaggggtgggaccctcaggggcagagacccagaggtgggaaagaacagagaatttgctgtgaatggtttttgagaagggatgacttgaaagctgaggcctgaggggaacagggagggccaagcaggaaggggccgcggccatggctgtgtttgggcagcagagtccgtgccaggaggtggggaggctatcggaaggctgttggtgagaaaggagaaaatatgcaaagcagatgtcaacatggctcaaaagcagaaatggtctgaggcagggtgttgaagacactggactcgcaaaagcagcttgtgctctgatgttcatcttggcctccctgtccccgaggcttccggatcagcctcctttatgtactggcctccagaaacactgtgtttagaattgactgtgtcatttccaccctgcatcttacagttacagacatggaggctctgggaggcagggaaatgacttgtccaaggtcacatagccagtcaaaaaaggcaggacacaaaccctgcgtcccagacctgttcgtccccctacaaccacttaggggttggtgggcaattcgtactagagtataattgactgatagatgctgttaacacaaagtagcccttttgcctttttttttttcccgctctgtcgcccaggctagagtgcaatggcatgatctcggctcactgcaaccttcacctcccgggttcaagtgattctcctgcctcctgcctcagcctcccgagtagctgggattacaggcgcccaccatcacacccggctaattttagtagagacggggttttgccatgttggccaggctggtcttgaactcctgacctcaggtgatctgcccaccttggcctctcaaagtgctgggattataggcgtgagccaccgcacctggcccagtggccctttttacaagaggagctgggttggaattagaatgttcaggaggcaggaaaattctctggaggtcttgctgaccataacaaatattcctaagtagctacctgctccttgaccaattctatagatgcagaaactgaggctcagagacttgcttttatatatgagggccacaaagtcagttgcttcagtggtgaaaacatttcccatcggaaggagcacagagtgtgggtgcagccacttgtgtgcatgtgactgacgtggccagagcttccgatttttcaagaggaaacaaaaatttagattttaatgtaataatgaacagctacctcaatttctgttttttttgagacggggtctccctctgtcatccaggctgcagtgcagtggtgtgataacggctcactgtaggctcgacctcctgggctcaagcggtcctcccacctcagcctcccgaggagatgggactccaggcacacgtcaccacgcctgaataattttttaattttttgtagagatggggtctcaccctgttgctcaggatggtctcaaactcctggcctcaagcagaccttctgccttggcctcccaaagtgctgggattacaggcatgagtcaccgcgcctggccgctatctcatttttaaggaaggaaaaagggttcagggtcctcagaccgcagcgttacacccacagaaccttccctaaatcactgccctcccgcagcctcctcagagagaggtggggttggctaggagtcagaacgctagcccgtgccagtttccccatatgtaaataytcggggtggactgagccactctgaagctttctttttttttttccttctgagatagagtcttgctctgtctcccaggctgaagtgcaatggcacgatctcggctcactacaacctctacctcctgggttcaagtgattctcctgcctcagactcccgagtagctgggactacaggcctgtgccaccatgcctggataatttttgtatttttagtagagacgaggtttcatcatgttgtccaggctggtcttgaactcmtgatctcaggtgatccacccacctcagcctcccaaagtgctggattacaggcgtgagtcagagcacctggcccrctctggactttctcaaagctcatgtgcctgtcccctgagtcctccccstcccacacttacccctggtctgtctgtccccccagggctcacccttcagaggacaatgacttttacatcaactacaaggacatcgacctggcttcccagcctgtctactrtaacctgcagtcactgggccaggccycaatggatgaagaggagtacgtgatccccgggcactgagcctaagatgtcctaacctccacccagaaccccttcagtccctgctgggtgactcagggcgtcctaackcctccatggcctcagtttccccatctgaagaatgggkacaggaaaggattgtccttgaggccccaggaagctctgccgccccctccctgtccctcatgccgctcctcagctccctcagctcctagagggggaagaggagagacccccaacaaggggacaggasggtcactgtgccaatcctgtcatcaccctcctgtggatgtacaggcagtgctcaataaatgcttcgaggctgatgaggctgctggctcagggtgcgtgggttcctcaaggtggggatttctgagttctaagaccaagtctccatctgagactcccaaattgctccccacctcccatccctgtttttttttgttgttgttgtttgtttgtttgtttttgaaactgagtgtcactctgtcacccaggctggagtgcaatgctgcggtctcagctcactgcaacctccgcctcctgggttcaagtgattctcctgcctcagcctcctgagtagctgggattacagcacccgccaccatgccgagctaatttttgtatttataatagagatggggtttcgccatgttggccaggctggtctcgaactcctgacctcaagcgatctgcccgcctcggcctcctgaagtgctgggattacaggcgtggccactgcgcccaggcacattcctcccttctgcccctctcagggccccttcccaggtccctgatctccaggcttggcctccagagcagcccacaccacccccaaaataaaaaaatgtatatattcctttagctctaatattctgagaaaatctttcaagaccctggtgcaatgccacctcctttgagaagctgtccctggtttcttctcaggcagagttaatgactcacagatgtctgtatttcaagagttttktcaggctcatgcctcaactgggtttcctatcagctggtcccagcccaatcctccaacctgggggagatagaactagagacaagtaccctcagtcctgggagatcaagcctgggccaaagggaagaatgggagcacagtccccacatggagacaattgaatgagtttgaataaggctgcatgtaagaggggaatctgcagtgggttttgaaggatgcataggagtttgagaattggagaggaaagggcatgctggctgggtggaccaacttgtgcaagagcctggagaagcacagagaaggcacaggcccagccctataccttgcaaaggcaacagctgttgtttggggaaagactcagtgacaccatctgctgccttttggtattgagtttaattttgaagcctcctaggtgcccattttcaacagctttgctgtgactgaagtgagcctgctcccatmtcagggcctttgcacttgctgtttgcatttacttgcaatgtccaccctcaactaccccctccccgactccttttcttcctccaggtctcagctcaaatgtgacctccctccccagggaggcctccccatccaactatctagatcacctctgcctccgttcactaatgaactgatgggttgaatccccagcacaaatcttactgcaatcaactactttcttaggatttactcatttgtccccttcactcaaccaggctccgcaaagkggggtggtccttgtgtgtctttttacagctgtgtccggggcctggcataaagtgggcactcactgaatayrttaaggggaacctgcagtcattcaggttggcctgtgggtgatggcattcccagcagatacacctcactgctggaagtgggtactctgtccctcaagacacccatcgccattcctctcagagattcaggatgggcaggcagtttggtgtggagagggggctggactcagcacacctcaaaattccaacatcctaaacaggaagtatatataacctgggagatgtggtgtgcatgaaaatattcttcacaacttatttgtttctccctactctttatatgtgaaagaatgaggtgtcactaacatggaagtgccacaaacaggaggggtgatgggactaacccctcaggttggggacagtaccacaaaacaaggcacttggttgcagatagacttggctctgagctgcctgtgtttggaaaggtgactcccaagtggggagagcaacaggatggtgatagagacaaagacagagacagatcctctgcctcagaccccaaagagagaagttttgaggaatgaggaaagatggagggaagctgagacttaaaaaggtatggggtctcagctgtttccaaaacagaaacaccagcctgggcaacatggcgaaactcagcctctacaaaaaatacaaaagttagttgggcatgatggcatgcacttgtagtcccagctactcaggtggctgaggtgggaggatcgattgagcccgggtggttgaggctgcagtgagctgtgattgtgccactgcacttcggcctgggcaacagagtgagaccccgtctaaaaaaaataaaaagaaaaaagaaacagcaataaggagatagagaaatagagacagagagtcagggagtcaggaatggccaaggctgcccttagagcccacaggtgtcgtaagcaccttccaatggcttggcatctccgagaacaccttgccactcattccttgagcctttccacttaccccctcccaggtctcctagagaaactgaggtcagggagaggaggatcttctcaaggtcaccttcccttatcctggacaccacagggaacagttcagacagctttatttttatcaccagagttttaaataaatacacagttccatcagaccagcccccgagtccccaagaaggtcaccccaataaattaataataaataacagacttatataaatrcagctgtttgggcaggaatcgggtgtctcaggaaccttgagcscattccacagggcaggacaactgaggtcgcstccyccgcgcaggtgcacagtggaaggaccaggactgctcatatgcagtggcagtctttggctaacaagtcatcataggtctggagcgacaccccggtgtcggtcttttgaatgagcaccatgggattgtagctggcgggcacgcagcagggcgctggcaccgtgtcgggcttcaggcggtgcaggctcgtcttgatctgcgcgtgcatgtttgccgcccsgaactggctcgggcacgcgccgatgcacatggtcacttgcacctcccgtggcgacagcacccaatcggcccagcccaggtcttccagcgacgcgcggaccgtgtgcagacggcagcaacgcccgggcccgagcggacagtsgtccccgttgcgcgcacgcgctctgcggcgccccctggcggcttgcggccgcaagtgcaactccagctggggccgtgcggacgaagattctgccagcagttggtccgactgcgacggcggcggcgacagtckcaggtgcagcgcgggcgcctggggtcttgcaaggctgagctgacgccgcagmggtcgtgtcacgtcccacgaccttgacgccgtcggggacagccggaacagagcccggtgaaggcgggaggcctcggggagcccctcrggaagggcggcccgagagatacgcaggtgcaggtggccgccggatcccagccgcactgtgggaagacagatagggaagctggtcacccacaggcctaccgttttccaggaacgagggtgcccatttcccctaacacgccaagctggatctcaccacggcggcggcgcctttgcacaagttatttcccctaccaagagcatttctccgtgcgggcgcggtggctcacgcctgtaatcccagcactttgggaggccgatgcaggtggatcacttgaggtcaggagttcaagaccagcctggccgatatgtggccaatatggtgaaacgcccgcttytactaaaamtaccaaaaattagctgggcatggtggctggcgcctgtgatcccagctactcgggaggctgaggcagaagaatggcttgaatcggggcggtggaggttgcagtgagccaagatcgtgccactgcactccagcctgggcaacagaggaagactccctctcaaaaaaaaaaaaaaaaaaaaaaaaargggcatttctccccttgaatctcctgaatctcmgtatggctggctcctcctcttccttccagcctgcctaaaataggaagcaccctattttatttccttgtgtatcattcatattccctacttagaatcttagcttggttgacactgtgcctggcacacaataggtgcttagtaaatacttgaaggaattaatgtatatctgatattcaggcagcctgagattccaaccatggctctgcttttcttctggcagtcaaaaacttacttgcttcacttatttatttatttattatggtcttgctgttacccaggctggagtgcagtggggcactcatggctcagtgcagcctcaatctcctggattcaagtgctcctccygcctcagcctcctgaataactgagactacaggcacacaccatcatgtctggctaattttttttaaacatttttggtagagatggattctcgctatactgcccaggctgcaatgttctggcctaaagcgatgctcccaccttggcctcctaaagtgctgggattacaggtgtaatcccgagaaatgaagagtgccaaacccatcacattccagactactgagcctctaggaatcacagcccctcaggctggtacaagtgttagggagactggggagactggggtttgagggtgccttaacctagttgctaggcttagcaagggtgagaggtttgccggagtcayacggcacagatgggtttagggcgggctaagagtgtgcccctctgcctgccccctcctgggtcccaccacagcccagacctcatccagtgccctgcacccctggagcctccatggagggcacagagatggggaaaatactctcctcctcccctaacaagtcgctcgttgcatgtgactttagcagtgccttgacaagcgatttcatcagattcagaaccagctccagctggctctgcccatcacaaacttctatccatgcaccacacccccattgtttctcttggatcctggccccagcccaggtcagggaccatgcccacaccgcacgcccgaccccgtccccgggtttcccaggtgctgtgcacattcaggagggtccctggcatccctgtacctcagtttccccatttgcaacttggggacaggttataacctcccacgttgtgggtgcaaatcaggcatcggctaccccatcagacccaaggggatccaggatattcctacccagggcacagatggggcaactgaggctcaaaggtaggtctgggcttttcaagatgaggaatccctgattagatatgggggctgcttggggggtgggaggggatctctaagatttcacttaccttctggcgtgagtatccggactgcaggggccgggacgaggtcggtgttcgaatcttcccagctctggttggcccgcagcctggttagcaggtcctcgtagcgtttccgcaactctcggaatctggagtcttcggwgtgyaactctgagggtcccgggaaacttgcgcggctcgcctcggccagagacagggcgcccccatgcggcagccacgagagcaccagcaacaccaggagcatctgagagccattcascgtcctgagttcttgcccgggcatggctgtgcaggttgcggctctgagctgggactgaccagatgctgccggaccggcctttatagtccccggactttgtccgtctccgcctgctcagtcccgccctcctccccctgcctgcagagtaaacactccaatgaccacagctgggcggggtctgggggtgtatttagggggaggatctttaggtgggggcgctcctagtaaagctagggcacatttctgrgcctcagtatcctcttcctcgatatgaggacaccattccagcctgggagtctttttggaggaaaaaaagacattgttactatgtgaaaaattccagacaagagtttaagaggtggctgtctatgcccatgggatttcctctcttctctttttggttggggtcaaaggctaaagatggtgaaaaacaaaggaagcagaggagaacrggctagatggagccaggaagggcaaccttgatgtgtcatgcctctctgccatgcctgtttcctcaccaggaaaaaarggactgagactctcactggagaggtggtcaaatgaggggtaaagcacagggccagacacataggaggcacttgataaactgggtgttattgcagttactcatcctcctctggagaactcctactcattcttcaaaactctacgcaaaaagcccctcttccaggaagtcttctccaacattatctttccagtctaagcagggtgctcccaaaccccatccttttgtctggctcagcgctcaccttgaagccatcctcacaggattcataattctgggggccaggcatggtggcttatgtcagtaatctcagcactttgggaggccgaggtgggtggattgtttgagcccaggagttcgagacaagtctgggcaagatggcaatacctcrtctctaaaaaaaagaattctgcgccgggcacggtggctctcgcctgtaatcccagcactttgggaggccgaggcacgtggatcatctgacgtcaagagttctagactagcctgaccaacatggagaaaccctgtctctactaaatatacaaa

SEQ ID NO: 1598 - DNA, 121080 bp, Homo sapiens
  misc_feature (1)...(121080): n = A,T,C or G, or insertion/deletion polymorphism (see Tables 1-2)
tctgctggctctatgtcatgcccagagtgactttggaagcctcctgctgaggctggtactctcagcctgggtccctggatgactgcatggaacagagccgccacatgccctggggcactccagggcaggacttgatatgaacgaggaatattaaatttgaattgtgtcaagccactggccttttggggtttatttgtcacagcacctagtgatatcttagtgcagagggtggaaagttcccagctgggctgtggaggctctttgcaggtccctaccttccccagtagcctgagggacagtcttgtgggctcctgtgtggcatccaagacggatgaggccttcggatcaagccaatagcctgagacgcactgaggcggctgctacagtgggtagagctaaatgagagacagaactgaactgatgtgccaggcagactgcaggctcaactgtcrgagggcttgagagttagccagggaggcaggatgagatggtgacactaaggacatgaagacctgccccagcggattctgcaggtagtccaggagcctgcaggaagaccaccctttgagaactaccactgtaggggtgtgacaatgtgctccatcacatctaggaagtttcacatgcacctgtacccaaagccaggctcccagggccatgtggccaggagagatgctccctgtgggactctgcatcaaacaagactgaggagaggggccaagggagggagcaacctgctcacagtcaggcactggggtgggctctgaggcccagcttggagcagggggagagagtgggggatgccttgggaggaggggcacactgggcaagcctttctaccctccataaccgccccccaccgcccccacccctgcctctgccaatggctcctaccgccccagagctgcctaccagggggtagtcaagccatcattttctcctccttctgccttctcacatcccgccccccayccccaatcccttctcccagcctctcagctccctaagaaagcaagccttcccctctgggtgccttcctaacagtggcttagggctcagtccttactgcccccaccccaaagccaaagggagaggatctgcgatttacagcagagtgcagagctgctgcctagggccatcctgcatttagccaaagagggcgtaggttacacagccaggcccctccacacccttggacaaagtctgttcaatcgagcacacaaaatagaaaccaacgcaactcaagttttaaccgcctcccgctctccagcaggtgccagtgcccccatctggggatagctcatttccaccaccggtggtggctgagtactggccccttgccaccatcggagctcagccctcagggtccagttctccaaacccaaaagaggtcgcctccccacactacagcctccagcgtaccctgaggtagctggcagggcagccccctcctccattcataaatgcacatcagaaatgcttccagaggccaggagtaaagacagagaaaccgcgggaagaaggccctaggggggggcgctcccgacctaactaggaaggagtatgcatatgcaaatgcgcccagggggcgggtcctgggtccggagccccccggggcgtcccggcgcagccctagccctgcgccatccccgcgcgtgcgccccctctccgcgatcccttacccgagccgtgcctctggcgcagcaggaccgcctgtcccgatggcggcgacgctgacgaggcagcagcagctgccgcgactgtggtggtgggcgtgtgggccgccgaggctgccgcggcctcggggactgcgggatcgatggcggcgggagggctcccgggcggcgggctcttgtcgccgcggccgggctcggaggtggtacggctcgcggcgcccgcgttgttggcgttggcggcgctggctgggccgtggcgacgcgggccgctgctctggatgtgggacacggcctcggcggcctgcatgttgggcggcgcgaagcgcgagagcacgcgcagcatcgcctgggccttgtgctcctgcgtgtcgtcgtcgctgtagtccgacacgcggcactcgtacacgccctcgtcctgcagccgcacggcagacagccgaagccggtgtgaratgtcattgccctggacgcgtacggtctgcaagagagcagggttagaggccgggctgggcagctcccaaacctrctcttctggccaccctggccgtcgcgccccctcatccgcgcaccccaacacttcccggatcctggtttgcccaccatcacgatccggcttccctttcacccgcgtctacccagtggcatagggcttccaactctgcgtggacgccaggcagccagctctttggactgtgtccccacgtccccatcacgttaaccaaacgcccaccttgcatctgccccgcccatacaaaccaacactgcttgtcttcccgtagctggcgcttcagaagggcagagtccacctctccttcctccctcctgcaccttcaggaaaccccaggctggattccttgttccttaacttccccacgtctttcccgccccgacgcgctccaaccgacagtcccgccccagccggccctcctcacctcccggagcacggagggcctgcccgaatcgcttcctaaggaaagccaccctgtcaccggaccccgccctttacagctaacactstgctttcttaagaaggcaagcaacgctgaggctgctgcctggctccctggccacctgctaccaacccgcctttccgcgggatctccagaagccccccagcgaagtgctcctcccctgcgccccggtggggacttcgggaagtactgctctacggctctcaacaaacacccagggagccctcacctctgaaccgagcccacgaggaggcttcgtcatctccaggcctttctacgctccaggtgggaagcttgggcgcatctcctcccagagttagcaaccccatgacccgggcccctcgcagcctggcacaaccaccccctaccccgtcccctgcaagcctgcaacacmccgcasccagacccgcaatccaggcggaggataaagggttgcagcggagggcgcagagcagatgctcagggcggggcagagggggcgggaagctggcgccacggtcgcggcgagggcgagcagccgcgcgctcccggtgctaggaggaatgcccgcagagcrgaggctggcaggcgcgagaggccctaagcgcgcagtccgaccaaggggagttttacaggtcagcgccgagccgaattaggggactcaagccttggacccttgatttacacaaaagagaacccgaccctgcaaccggcgacagatggcgcccggacacgccgagcagccaccratgcaaggctgcgatcgctgccctacttgcgcggccccacatgcgcggccgccgcggcttgctaagggagggagctgcgggacccgaggcggccagaaggggtctcccgcggcccgcgctgggctccacacttacgctgattttagttgcatccttatttgttacctaaaatgcaaagagggagagagagacgtgaggctcgcggccttctggctaggggaactcggatccgcctttaggcaagggcaccctcctccggcaggctaggaccgaaaccgcccgggggatgggggttgagggcacaaaggacgtccggctttccaagagtttcccaggaggaagcgggctttggagctagcatggtgcctgaccaacgggtggctgccctggtgcacacctgccggctgaactggggagactggatggacaccagggtgggaaggaaagcccctctccttccctctgggcatccttaggccctgccgcgtggctcaaaatcctcccccagctcactgggagccgtgaagaactggagggagggccgctgtgtctggacagcacccagcgggaggctcagtgggagtaactctgggtgggaccctgggagaatgtaggtgtgtgtaggtgtaggtgtgtgtgtaggtgtgtgtgcacgcgagcacactagagtgtgtaagagagtgtgggttttgaggcagacaggcagcgtgggcctgttttcggccacagagaagtggcccctctgtgcccctgagggctggaggtcctgccggctttccggtactcggttttctggtggcctctggaacgcagccgtgggagccctggggtcctcaaagtggcagagggcggggagagcctgatgggaccaagggggcttccttcactacccagcacccatcagagggccgcagccagcgagcacgagcaagcgaccaggctgaggtgtggctctttaggggctgggcgtgaatggagttctgggaggtggtgggaacagcgatgctgtcaaaataattgacaggtttgggggtaaccactgctgactttgaagatgctttgggatgcgaaggtggaagatgggctgcgccacagggcggcgccctgcgcgagtgaarcccgctgcttccctcccygggttagccttcgccgccccgggcgcgagccgggcgcgcgccggtaccgcgtgggcggcgggttaccttgctccgggcgcccggcacgctgagcgccagctcgtgcagcagctcccggggtggctccttgaggtaccaccactgaatctccagcgaatacgaggtggctccgctggcccggaacgcgcagggcatttcgatgtcgtctccctcccgtactgtcacatctttggggacttctgtgaatgcagctgggggtggggagagagagagaggcgtgaccagctgtaggtcgggggcctggggcaacctaaagmgaggcagtcggtctctggctggctggccttgtgccccccaccccgcagctgctccctggcgcacggccggaggggctagcaaagttcggggaagcggctgcagggccgaggcagggaccggccatcggctgcctactgcttccctccggatggggcggggcggcaggggcgactcgtgcttctcccccgcccctggccgcaccgccagagcctggctggggcgcgcctactcccgctccccgcaggcatcctttccgcagccggggccccggcgggactgggaacgactcgggcgcggcgctgctgctgcggcgacccttcgccgctcgcctctccctacccctccgggcccaggctgcacagcgggattgctggagaccgcgaagcttcccggttcgttctctttcttcttcttctcggtggcggccccagcaaagacccccccgagtccacagcggcagcaaagttcccgcgctcaccgtcggccacgaagagcagcagggcatgcagcagcagaggcggcaggtatccgagggcaccgagccggttccgctgttccatctcccgcggggggcgcggtggcggcgggggcccgggagcggagaggcggcggccgcgtgggctcggatcggctccggctcgggctaggacgcctccgagcctgccatggccccgcgcggcgccccctcccctggccgccggcggccgccaatcagccccgctccctcgccggcttgcccggtgcggctccggcggggggcgctgcgcggggtgtgcaggagacgcggtcccaccgggaggctgctggcgatcggtcagtgcctctctctgtccggtcgtccacaggacggtggggatccgcggttcagtctctgcccggcgggccgggcaggggctgggccgcgccgggacccatccctggccgagggagtgcgtgccacggagccgcgagcttctgcctccctgtctccttctggttctgctcccgattgccacctccttcggctcccgcagccgcccccgccggttcctccgcggctctttccgcagggcgagtgggcgctcagccgcggcgcgcagacctggcgtccgacccagcgcagcgcggggagagcgggtccggcgtggcggacccggagccggagagaggcggggagagggggaggggaggggaagggagggggcggtcagtggctgggcgccaagccgcctccaccgctgcatcgcccccgccctcccctctcctgccacagcccgccccgcccccgccccagagcgctccccctctctcctcgggggtcgctcggagggaccaccgtctttctggttggagtacagccccgccccgcacccgcttgggttgggagtcctcccacccaaactctccctggcttcttcccagtctgcacggctcgagacggccgctcatccctgctccccgtgtgtccctcggtcctctctgcagctcccagccctcaactccttaccccagtttgggcaaccagctgccccgctgtttggcccaggcctgggccatgacggatgggtgggcgcccggggccgcgagaagggcggaacgctgtgcccagccggagactacgctgggtggcggcggcagcgccgggagtctgcagtgcgcgagggagaagtgagcgcacagcgcccagcgagcaggtgcctgcggcgcggagagcgcacacgctagccagcccgcagcggccgtgagtgacggcaggggcggcgggggtggggtggggtggggagcgccgggcacgactcagggcccgggaggtttccgggagggggcggggttcctgcccctggatcgcgggtccctgtgtctccacgcgctcttcgccggtcgtggccccttctttgcccggtgcaaagcgagatgccgaggcggcaggaagccggaacccatcccccgcctgctctggcgtactcggcatcccggtacctcccccagccttcacccggagtctgctccctccccagccatctgagggagcgcggtctggtccccgaaggcaaatgcggggtggacatgtggttcggacgcagcgcgtagtcatagtcataggggcgagtcctaaggctcgccttgggtctctcctatctccttcccccgggagtccccagctagtgcgtttcggcacctctgcccctaccccggcccctacgcctcagctctgacctcaggttggggtggggcagcccggtggattcacgtgcctgcttccccggctaccagcctcccggaggcaccgccagaggattccctgggagccaaggagaaggaaacccagagggaaaacactctccagcagccaccctggtccaggcggccagcgcagcacagctcagaggggaggagctgcaggccctctccaaggctgtcctcgccagcgggtgcycsgggccagcccttcttgcctccagtgcctgcctttcagtttcctcgtctatggcccaggagtcactcccaccccctggctcactgtggctcatctatcaagcccttgttttctaaggtctcctgctgggggcaaagggaagaagggggtcctataggactttcctcctttccctcaagttcctctctaggggctccacagaggcagttgccagctccttctgtcatggcaggagcttttcctaggaaatcccatgtgcccttagaaaccactttggacccccgaatgtaagaccctgccaggccccattgctgtcctcagcttctgaagggagagggcagacttgcaccgctctatgcagattcaggaccacagcggggttccaggaaagcaggctcatttggggactgattccaagcagggttctgaagaaagagctagcccactgcgcagtggcccacctggagaggtagcagtytcctttcctgatgccagatccaagcagaggctaatgctggagaccagcgatgcccgtgggagaatccctgtagctagagggaattatctggaagtaatttatccctgtaccgccttgtggggttgggtgtttcttgcccactgcatgagttggtattactctaagagcgacagatacatgttttcacatgctttccatgtactagacactttctaggcatcagttctcaacatgacaaagagatccttctcagggaaatcagatccctcttccactgctgaaaaaccccacagtggctcccatttcacttggcataaacaccagtggccttgcagtggctgccaaggtcaaaccatctgcctttctgcttcctgctcacccttttccttcatcttctcatcttttctgtcttctccatagctcacactcccctagccacactgttctccttcctacaatgcagcacactgggcatgcttctaccccagggcccttgcaccagccgcaccatctggttgacatgcttctcccacagatwcttgcttggctaactccgttgtgctctggtttttgtcaagcagtcaccttctccatgaggcccacctgggccaccatatttaacactgcagtctacactgcctctcctcccaccacccagcactcccaggccctcactctgcttcctttattttttccatttcgccagccatcttccaacacatgggaccacatccttatttattgagtgtcttgttgcaggtctctaagactgtgcctgccttgttcactgatgtatctctagcgcctacaacagggtcgggcacagagtaggagctcagtaaatacttgtggaatgaatgaatgagctcattttacctcaatcacaactccaggggtagacatggtgatttcactccattttatggttgaagctcagaagcttacggaacttgcccaaggtcacatagttagtaagtggctgagtgacgcatcaacccaaagcctgtcttactctggggtcctggatcttaaccaaaacactaagctcttccctcctccaggtgagcccctggtcctgatgcctcgagttggtgtggagagcaaggccctacccttgactgatrggagcaaggagcagcctgagctagacttgtagtctctttcctgtctgttcagcttggtctatctgttttctgccctgccttgtagactgtgatgagagcagctgacccacyttcactrtggttttttttttttttttttttgacacggtctttttctgttgtccaggctggagtgcagtggcacgatcttagctcactgcacctcaacgtcctgagctcaagcacctcagcctccagagttatcatgctgacaccaggaggattagcccaccatgccttgctaatatatatrtatwttttttgtagagatggggtgttgctatgttgcctaggctggtcttgaacccctgggctcaagcgatccttctgcctcagccttccaagtagctaggactacaggcatscaccatcacacttggctaattttgtgcttaaaatttttgtagaggtgagttcttgctctgttgcccaggttggtcttgaacccctgggctcaagccatcttcgtgtctcagccttctaagtagctgagactacaggcatgcrccaccatacccagctaatttttaaaatgttttttgtagagatggggtcttgctgttgcccaggctggtcttgaatgcctgggctcaagcgatccttctgcctcagccttccaagtagctaggactgcagccatgcaccactatacctggctaattttgtttaaaattttttgtagaggtgaggtcttgctgtgttgcccaggttggtcttgaacccctgggctcaagccatcttcctgtctcagccttctaagtagctaggactacaggcatgcgccaccatacccagctaatgttttatttttaatattttttgtagagatggggtcttgctgtgttgtgcaggctggtctcaaactcctggcctcaaacagtcctcctgcctctgcctcccaaagcactrggattataggagtgagccaccacactggctttctctgtgtctttaactcccagctgggcctgcccatagttagagcctagcaaatattcggacagggaaccctgctaggagcactttgcctcccttttgctgtgggttttctgtgagcagggcagggattttgtctcttcgacttagccctttggctagttggaggattagtgagctaagaccagactgcagctcctgccagtcagagggcactgggttccttccctgccagtctctgccaagcctggctccccactccctgcaggggagccatttccttctcactaagtcctggtgggatgtggtctctcagttggagactctaaagaaggtggctggggaggagcatgygtgtcacttctcccaaagggacactaagctctgcggacacagccattcaggtctacctactgtggtatctcttgggctcctacaaagatgacctgtttgcagtgaatcgtggttatgtgaagctatggacttgagagtatttcatgatcattttgtttctagtcctgattaatcatcaatgggaactaacayggttttcccctccctccatccacagctataaaatgcctgtggggtcgctgtgcacagagacctggaggcagatcctcttgtaatgtggttgatggggccatgggttggctgccctgcccagttggctgtgcccggggggcttgcttctgccagggcctggctactgtgtgcccagcctcggggctctcactcattacctatcatgagctgttawtatagggctgtgagctggggtgcttgtcaataccattttgtggatggattcactggactctcagaggcactttaaaaagcgctatttaaaaagactgcccagcctcttgtgaaagcacccttaaattacagccctaagtgagtgtttttcctggaactcactttcaaaatttatttattttaatgctcaggtcctcttggagttgggtttcagtattcttgtctcggatgacctttcttgtcctccctgtaccatgtacggcaacaytgattttgggtaatgtattttgattttaagatgcagcccatccataaagttktctatcaataatcccagcacactctgtgtacccgacagcttataggaaaataggagatttatgggggcttttatttttggccagtttagtcattcacacgccaccagtgtcagggataatggcctgaagtccggtcccaggaagacgcccctccaagggcacacatcaggtcatcgaggggtggaggcctggccctgcctggaccctgacagggactgctgggtactgctggagagggaagcagtgattgatgcccctaagacggaaggaggggcaagtgaaacggctcacattttgggttcctggggcccttgcttgccccacgtcctcagcaacttggagtgctgagttccaggaggagggtagcaggtgccagtccctgcattgcatggagacaagagagggccccctgctgtcaccagggccatcagggaggcagcctgccctttcccgtgtgcgctcgcacttgrcaaagcaggcctgctcgtggtcagccaggggttggccagcagcagcaagaggactcacagctgccaggccccagggtctggcctgacattgctgcatcggtgccatcacactgcatcttcagagccttgggctgtttgcttccttgtcacaggcaggatcagttgggtttggggatggtctagagaaggtgaacacyacrggagaaactccaggcagggcctgtttcaccccagacatttttccagccaacatgtcccgaagactgatcatttatctagcatgtgtctcaygatatgctggtgcaggggatgctgccataagcaagacacacaggcttcctgcctgcagggaattcggatttgcacccgggagcgggtggagacagacccccagagaagaaacaaaaactaagtctgatatttcacccagtgctcggtgcacacccgcacgtagtgggaattttggtggtgggggaaggtctggggctgtcagccaggcagacctggggaaggaagagtgcttttggcagaggacacacgagtgccaagcccatgggaggagacatgggggtagagcatggcttgtgagcgaggggggcttggtgggacaggaggcaggacaagggaagctggggctttgcagccacatcaaggattcctgtgcccagaagagcggggctcagagctaagcaagatgtggccctggctatgaggctcagagcctcgtggggaatcaagctaagcacatagtgatcccagccctggcaggggccacctgaagaggtgagcagtgggtcctgcctggggaggcttcctgagttccgcctaagtgcagagtagaatctggctgagctaggtgggaaggggttagggtacatyggcatcccagacaagcagctgcctatgcaagggggtacaggcaggagatctggggacttcactgggacaaagagaaaactccaagaaagcaggatcagcagaagtggcattgggggacaggacagggtaaggctttggacttggtgacaaggaggagttctgaccctgatggcagcatagggggcagtgggagctgggaaactgccatcccctagaggggcggtggctgggagctgagggcagaagccacgtggttgccacagacyyctccttattgggtcctggctctgaggagagaccatttaatgtgtcctcacctcccaccttcctctgctggccaccccctttgcctgcagakctggccccagcaaacagcagtgcatctggtgcagtgaaggtgggtgggtttcagagcaggcccctgtgcccaagtcccagggccagcctgcctcgccccacccttcctggttcctctgccctcccttgggtgccagcctctgtgttctatagggaaagcccagacgctgtctctgatgagtgtcatcaaagcaagatcctgcctcacggcctgggcygtgtatggccaaatrgacaattaagtaaaaagcaaaacaaagcaaagcagaacgaagcagagtggggtccagggctatggagtctgatggacgttggctcagatcctggctttgccttggccttgcagagcttcgtttttctcatctgtaaaatgggtgtactggcattgctgcctgcagtgggtgaatggggggaytggttttgagagccagtcagtcagcacctggggtgtggccctaacagcaacagtccacatgttggtgcataygccttgctagctttggtgatgtgaggatgtagcatggggtatttgagggcatagcccagccacttttgaacccaggtgcttaagaggggtggtgttactaagaggagaggaatggccagaacttggaggtgactggtggagctgagcacccccaaattgattttattacagccyctgtgtgtgtgtgtgtgtgtgtgtgtgtgtgttatttaatcatttgccaagataaatcttatagacccatgaagagtttattttttttatttttaatattctcaatacacttggggttttatttcccactagatctattagtttaatttagtagaggacagactgtatacttaacaaaaaattgctttgacattatggagaattaagaggctggggccagatggatctcagcagatcgatctgttggagataaamtctgctatttccccgtgcgcttccttcaccttaatggcaaggctggtgattagaaatcatggagccagctcgtcatgaccaagggtcggccagagggtcagggccctggctcccttgtgctctccagacccatggagaaggctacctgctggcaggatgccttttaatggttccagtggagatgctatgggggcctggggcatctgtggcagcttcccagtgctgggtcctgccagccttggtcccctgtgactgaccaacctcctgcagggttggtctgatgtcgtcagggaagcaggaacacagggcggggagcacggtgcaatggaggcagtgaaggggtggtcaaagcctggatgcagacactgccactgttggatctgtgctgagtctctccaccacaccgagccttggaccctctgctcagagggcactgggttccttccctgctcccagggctgctgtgaggtccaccagctgatgcccaggaagtagctttgcaaattgtcatggggtgcactcaggtcaatgttcatgtttctgtgtcccctgaatttctggatcccgagtggctcgggaaatgccagtcacactaaagtgtggcttctgatccaaacccccaaggttctggcatcccttctccatcttcctgggccaccatctagaggcttctgaccagagcatccctgagaatgggtcctggggccagctggtgacactgtggacacaggagtttcctggctcttggtggctcgcctctgtgccctggggtggctctgaagggtgggggaagcagaggatcctccatcccaccaacactgtcctgggctgagtggcccctgaaggtctagggccccacctggggctccacggtagggcacaggatgtggactccgtcccacttcacaaccctcgtggttgccagcctggctcaggtctgcacctgcttgcctgcctgttcacacagctttcctggcagactctggccagctgcagtctctcctcctccaggaagmcttcctcctgcttgcttcctcctaacatgttggactgcccttgtttttgtccctacatgaagaactgccctcgtgtctgsctttaagctcttatttcaggaaggccctagacctgctttcatctcaggccagctcccagagtctgaggctgcacctgggcttagcaggagagtgtaccatgttgygatgtctgctgagggcttgggggctgggggaggtggcaggattcgctacctctagagtggctttctgggtctccctgagtactggagggagctaacggcttcttgcactgtccctcgaaggccagcacagggctggctctatgcgcatgcaagtctgtgccagagttgatgggctctggraggcccaatgtccatgtgagaggcggtgtgctcrgggagggggctgggacctggcagggtctcatttcagcccactcccagcttctgcccaggtggggttacctggaaaaaargatgcatgctctgagcccttccagggcaggagctgtgctctggtcatcctcgtacctgcctagtcaccttgcctggcacatggcaggggtcagtgggtgctgggctgcaggaagctgaggccatttcacatcttctggtggggcctcaggcccaagctgttctctcagaggaaccttggtctgtcctggtctcatcctaggtggtggcctctgcactgtgggactgcrgtaggcacmgtactggggtttgaggacagtcacaacctccggatttgacatcatctttggcttcagaggtcagttcattcccccactgcagagagcacatgtggcaaatggaccaaccaggtgcagagggatggggtggtcctgggggggctgtggccatctaggccctttctccccttggtgctgacgtggggcctgggcggagctctgtggtactgccgtgaccttcatgcctgacttgtccccttcgagtccctcctgctgatagactggcagctgccagcgctgcgcggtttgtgaaatgtcagtggtttaatatcaattctggaggttttattgcctttccccctgttttccgatgggattttgatccaatcaaagccgatatagagtgatggtagatttgtgytccggtccgaagttggcaaaaggtcaccgtgcctggggagctggggctgcctggcctcgtgtacatrtggctgctgtccccctaggctctgtaggcagaccacgcttccccagaagcgcagggtcaggtggacacagactgctcccccggggcctgctggctgggccagggtacctgcgggtttaaattcagcaatcaccagccacagaaagccctggttttatttgcaaaacatctgtgatgcttcagatctagcttaatttttcacrgtaatgttgcaaaatgtcatttttccatttcaaaataaaaataaaaagccctattgattgagattctctgtctggggagagccccggcgcygggccacactggcttgtgccccctaatccccctttccctcctctctccggctgggctctctgtactcaccagcaagtgccactcgctgtccggctccttccaggacccggggccggtgaggggggataatgggtgcaagattctttgtcaagttttgagctggtcccatgccactttagacaagtggtatctagaggttttatccagcttggcgagtctctagggagtgcctgctgtgtgaaaggcctggtgctggcttggaggtgggtggtggggggcacacctggatggaggaccaggccttgctgggctcagagctctcacttctttgctgtggaagggttggtcccgtgtgattgcagtggtgccatcggtctacaccgtggcttccagagcccttttggctgggggatgggcagagagatactagggtgagcaggctgaggggacagaggggcaggggatgagtgacagagctgggggaggcctggtgagagatgagaaagggagcggcaagtgcacctggagggttggcaggggctagagttcccccacacctggagtgygcctggagggtcggtaggggcatagttcccccacacctgcctccctgtctctgggcctggggagggacccagaggttggccacccagaggttggccacccctgggtctcagcctcragcaccaccctttcccatggctatgtgtcccctaactcttctaggtgctggggtcccaggggtgtgacctcaggacacagacagcaggtatgcagagaggatgtgtatgtgtgtgcacacacttgtatgcggacagtatacccgtgtgtggatggcatgcctattgtgtgcagacagagagcgtgtgtgcagatggggagtcccctgtgtgtgtgtgtgtgcgtgcacacacacaaataatgtctgctggcatagaggagtgacagctgatgtgagcagatgacacagtgtgtataatgacatgcccagagtgtgtgcaggcsgtatgtatgtatacagaatgtgtgtgtgtagggaaaaggcagcaaggtgtgttccagccaagaggccggcagtccgtgtgaggcaacaggaaagtggagaccttgctcttggaagagaccgtctccttcctcctcatcctcactctctgtcttcctcatgtccccctctccttcttcctcataccctgtctccttcctcctgattccccctctccttcctcctcatccccccatctccttcctactcatccctctcttcctcctcataacccctccccttcctactcatcccccctccttcctcttcatctgccctctccttcctcatcccctctccttcctcctcatccccctttccttcctcctcatcctcctctccttcctcatcttccctctccttcctcctcatcacacctctccttcctcctcatccccccctccttcttcctcatcccctgtctccttcctcctgatcccccctctccttcctcctaatcccccatctccttcctcctcatcccccctccttccccctcatcccccatctccttcctactcatcccccctccttcctcctcatcccccctccttccccctcatcccccctccttcctcctcatcccccctccttccccctcatcccccctccttccccctcatccccccatctccttactactcatccccccatctccttcctcctcataccccctctccttcttcctcatcccccctctccttcctcctcatccctcctccttcttcctcatcccctctctcctttctccacgtcccccctttccttcctcttcatccccctctccttcctcctcatcttccctctccttccccctcattacacctctccttcctccttatcctccctcttcttcctcctcatcacccctctccttcctcctcatccccctctccttccccctcatctctccttccttcctcctcatcacccctctcctttctcctcatccccctctccttcttcctcataccctcccttcttcctcatcccctgtctccttcctcctgattgcccctctccttcctcctaatcccccctccttctttctcatccctccttctctttcctcctcatccccccatctccttcctacacatcgcccctctccttcctcctcatctcccctccttcctcctcatcccccctccttcctcctcatcccccctccttcctcctcatcccccctccttcctcctcatcccccctccttcgtcctcatccccctctccttcctcctcatctcctgtctccttcctcctcatcccctctctccttcctcctcatacccctctccttcctccttatcctcctcatccccctccttcctcctcatacccctctccttcctccttatcctcctcatccccctccttcctcctcatccccctcttcttcctcctcatccacccctcctttctccttataccccctcttcttcctcctcatccccccttcttcctcctcatgccccctctacttcctcctcatcccccttcttcttccttctcatctccgctctccttcctcctcatctccccttttttctcctcatccctgttcatcttcctcctattccccctttccttcctcctcatcccctgtctcctttcttctcatccccctctccttcctcctcatcccccactccttccccctcatccctggtgtccttcctcctcatccctatctctttcctcctcatcccccctctccttcctcctcatcccccctctcctttctcctcatccccctctccttcctcctcatcccccctccttcctccttatcccccctctcctttctcctcatcccccctctccttccttctcatctcccctctccttcctcctcatccttcctctacttcctcctcatgcccctctccttccttctcatcctccctctccttcttcctcatcccctctgtcctttctcttcatcttcctatccttcctcaccatccctctctccttcctcctcatcccccctctccttcctccttctccaagacttcctttcttcttattaccctttccttcctcctcatccctctctccttcctcctcctcccccatctccttcatcctcatttcctgtctcctgcctcctcatcccccctctcctccctctttatcccccgtctccttcctcctgatcccccctccttcctcctcatcccctctctcctttctccttatacccctcttcttcctcctcattccttctttccttcctcctyatcccccttccttcctcctcatycttgttctccttcttcctcatccccctctgcttcctcctgatcccccctccttcctcctcatccccccctttctccttacacccctcttcttcctcctcattccttctttccttcctccttatcccccctccttcctcctcatccttgttctccttcctcctcatccccctctccttcctcctcatcttccctctccttcttatactccctcaccttcctcctcatccccctctccttcctcctcatcttccctctccttcctccttatactccctctccttcctcctcatccttcctctccttcctcctcatcccccttctccttccttttcatccccccttcctccgcatcccccctccttccccctcatccccatctccttcttcctcatacctcctccgtcctactcatcctccctacttcctcctcatcccccctccttcrccctcatactccctgtccttcctcttcatcctctttctccttcctcctcaccctccctcttcttcctcttcatcyccctytccttcctccttttctcccctccttcctcctcatccttgctctccttcctcctcattccctatcttcttcctccttatcctccctctccttcatcctcatcctcactctctttgctcctcatcaccccctccwtcctcmtcatcctcctttccttcctcctcatccccctctccttcctcatcctccctctccttccwmctcatcctcgctcttcttcctcctcatccccctcctttctcctcatccccgctgttctccttatttcccctcttcttcctcctcatcccccctctcctttctcctcatccccactctccttcctcctcattccccctctcatttctcctcgtccccactctccttcctcctcattcccagtctccttctcttttcctccctccacctcccatccttcctctcacctcctcctcctgctttcttttcttttctttttttctttttctttttttttgagatggagtctcactttgtcgcccaggcatgcagtggcacgatcttggctcactgcaacctccacctcctgagttcgagcgattctcctgccttactcagcctcctgagtagytgggattacaggcatgcaccaccatacccagctaatttttatatttttagtagcgacagggttgcaccatgttggccaggctggtctcaaactcttgacctcaggtgatccacccacctcggcctcccaaattactgggattacaggtgtgagccaccacaccctgccccatcctgctttcttctaagggcacactttccctcctggggtcacaattctgggcccgacttccctttcttcctcatttctcagaacagtcctccytcccttgctgggctgctcttgagggcagagtggatggtgacccttcccctccacgccaggcaggcttggggtggccagaaagacctgctccccaggacttgccctagccgcagaagaggggaycccctgcccgtgcagccccagggcttctttccctcccctgctgcctggaaggtggcgtccgagagctctcagaggcttggggcccagcatgtggatttgtaggccataaggggcaggaggacaagcagggaaatgggtggaggggcctgcaggggacaggcagayatggaatggggtgttggggggcgggcctgagatgctggggattggcagggcctggagccacattgccctcccgcattcctggggtgggagctgctgggctctggcctgtggctgccctgtggagagcaagccctgcgtggccagctgccccagtgtttcagatgaagctggaaacccagatttttatgtaaaatctaattgttatatgttggttctactgcaaaaataaacgctgctgggtctgcaggctgatgtgagggcccagcttgccacctctgttcagcctgcatggggctctaggcctcctctgtccagccccagctgtggctccctgggcaggatactttggtgtggcatccaaccagagggtctgaggtgtgtccttgcccactctcctctcagccttattaaaacctgtggtgacaggccaagtgcagtggctgacacctgtaatcccaacactttgggaggttaaggtaggcagattgcttgagcccagggggttgagaccagtttgggcaacatggcaagaccctgtctctaccaaaaaatacagaaaattagctgggtatggtggtgcgtgcctgtggtcccagctactcaggaagctgagacaagaggatcacttgagcctgggaggtggaggctgtagtgagctatgattgcaccactgcattccakctggatgacagagtgagaccctgtctcaaaaaaatacctgtggggacagtgatagaggacgggggagarttgggcaccctcatgcyagctgtggggatgcttgtgagacttgaagtgcctgtgagctatgttccccatgggttcgcaaactcacctgagtttttaatctatttcaagtttgggtgaggatgttacccctgaatttggcctttttttcagtcctgtatctaagttaccctctcacctgtgcctggcactggagcatttgagcccaggaataatcgcggatggtgctggtcacagggaagcatctggcaggtggtgctggctgcagggaggcgtttgtgcgttgctctgcctgggagggctgtgcacctctgcaagtcaggttctgtgctctcctttcaccctcatgccaatgctgtgcctagaattcctctcctttttacagacaagaaaccgagctcgacgcaagaagaagtagctggagccccagccctgaggtccctgccactgcctacttagctcctcactcytgggcttgagggtcccaggctggagaggacaragggcttgccccattcccaggtcttcctgcacaggcctacaggggccaccacccatcttccttccctgcacagcaaggcctccctgcctcctggacaagtgtgtcttctgcgtggacttccaggccaccctgtcccggaattggctcctgctgagrtgcctcagtgctggcgtgttctcaaattcgaggtgcacgtgttagtcctcatcttgactttctagcttattaggctgagctctgctttctgaagctctgggtttctgtgaccagatctctttactttcctctagtgactctggccacacatctccgtctccttgtaagttttctggtggccgcctttgtcaaaccccagagtgtaggggttccccacagctcagtgccgtgccctcttctctagctccagatggaggtggtcctttatcttggtgggcttccatggagatgtcacaagggaacttcacagtgttcatatgaagctggtgattttccttcgcaagccaggctctcagcaggggcttgaggctggtctactatgagcctggtagttgcttctgttttttgtcttggtaattggcctgacacccacatagcccaacatgagggatccctgatgcctttccctccctaccctctgcggcctattgctgagatctgggctgttacctttgggacagctctcagatctgtctatttctcttcaccgcctcagcctccagcctcgtcccggcccctgttgcctctcccatgccctgacacctagtactgcgcttcctcatagaagaggctctgtgagcagttggaggggctctcctgcactgaacgacacatccttctgactgtgtccttcagggcttgggctgtatctgcagacagatgtctgtgatttctctgcctctgttgccgtggtgccgttcaactctgagatgccacccagacccaggaggttcccacgggctcactctgccaggatgtctgtgcctcctcctcctcagagtcatcacttccatttgttttattcttttaaaatttatttcagatttgggggacacatgcgggtttgtcacatgggtatattgagtgatactgaggtttgggcttctgatgaccccttaacccaaacagtgaacatagtacctgataggtggtttttcaacacacactgcccaccctcttgtagatcccagtgtctgttgatcccatctccatgtccatgtgtacctggtgtttacctcccacttgtaagtgagaatatgtggtatttggttttctrttttggtgttaattcccttaggatatagcctccagctgcatccacrttgctgcaaaggacacaatttcattcttttttatggctgcatagtattccatgcactatcacttattgagtacctactgtgtacctgacagagaggaggtgtgcaattaagtgtttcttagattaacaagtgaatgaaggcatacatatattaacttaccctataagaaagttactatcaccattctcaccttgcacatgaaagtctaagttctagagccattttgtaaaataatcaaaagacgtgatgctggtccacagtgcagttgattctgagcctgtcccaccagccaggagaggccrcatcagagctgtccagggtcccccctcagcrtgatcttggtctcctccaccttctctccccattggagcatttcccctcttagcgcctcaagttagggactgtgtagacacagccattaggttagtcagtgcagactctggtgagcaactggataattattcccaaaaatattgacttgtgatgtgaagaaactcctctccatgccacccatcagcagaaaattgcctttggtattaacatttcatcaaccgcataatgtgaattgatgtaaatgcgtaattagaaataatagcctgggaaaatttgctcttatttataaaattgggcttcttaaattaaaatggaagctaatgacttccacgtactgttacaacatgtctgaggcttggcccgctctgctcttggaggctcttcatcacgtcggagggcgctgggggcatcaacagctctgtggggtgaccctggagcagggacgtcccccgaggcggcatggacaccacctgtcctaaagatggctctccagcaacgtgaataggcctcgcaaacacctcttcatcaacacgacaaaaggcagtctcccaggaaggaaggcgcagtgacaattttctgggctctcattcttccctagagtggaacggggaccagcctgccggctcacctgtgtgccagggaggtcatgggctttctgtgtggaggtaagcccctgctcgcctgtctcactgggcccatcccacaacctcagacagggaaccatgagtcaggcctccccaatcaggacactctggcccctgactgcagtaatagggtcaagggtgcacggtgtcccggctggacctgcgtgcatcatgatggtgagcttggccagagtcaccaggaaagtggcactcctttgtccccagcaaggcgggctgtgaggatggccagagycggctctgcaccatttggggacaagccggagcagagatcccgagagctgactcccgcgatgcagccgtgctgggagagaggtgcaccctgcattcctcaattccgtggaccttactaccttcctgttgcattccacactccagttggagctcagttttctgaaacagaaagagtcctggcagtctctatccaggtctttatctcccattaaaaatcactcattaaatagcagctgctgctacatttaataagacccagtttacatgatcccctatctctcctagaagggctcaatgatctgcaaacagcctcacctaccaaccctattggcatgtcatctgccccttcctggaggkcccagacttcaccttcctgggattgtgggtcccacgtgttctgcagctgagccctggagggcctggtgtgcagggagcttctgctggaacctggggtgaagtcagtgggaagagggcctgccttgggctgccctggggtgtgtggtagagattggtgcagacataggtggattttttattttaatttaatttctatttttaagagttggggtcttgctctgtcgcccaggctggaggtgcagtggcatgatcacggctcactamagcctcgatttgctgggctcaggtgatcctcctgcctcagcatcctgagtaactgggactacaggtgcatcctaccacatccggctaattttttaattttttgcagagacagggatctcactgtgttgtccaggctggtctcaaactcctgggctcaagctatcctcttgccttggcctcccaaagtgctgggattactggtgtgagccaccgtgcccagcctggatttctcatctccaaagaaaggtgtatgattaacgataaggcccatggaagaggagtcattcaaaagagactctctccagatagtttctgtcctgtcagttttcagagaagggccccgggggtcctgggatggtgcatttgggctctagtggggcagagctgatcctaactccgcctccagtgcctccccttggatgccttcccggggtcttgggacccgcactgtgggtggccacacacactgtttcctaggccgcgcagggcgtgctggggcgtgggtctaccctccaatcagacggagttctgaaggctctgtctggccttgttccaccatgtcctgctacyctcctcacttagggagtccaaactttyatttattyattyatttatttatttatttatttatttatttatttttgagacagagtctcactctgtcacccaggctggagtgcaatggcgtgatctcggctcactgcaacctctgcctcctgggttcaagcgattctgctgcttcagcctcctgggtagctgggaatacgggcgtccaccaccacgcctggctaatttttatatttttatagagacagggtttcgccatgttggccaggctggtctcgaactcctggcctcaggtgatccaccagccttagcctcccaaagtgctgggattacaggcrtgaaccaccgtgcctggctgcragtccagccattcaaggagacaggcagcatcgtccttgaagctgtccctctgctaggacraaggggaaattcttcacctcctcttttttttcaatggagaaacctgaggccagattagggaaggggctggcccagggtcacacaggggtcagaggtggagaatgggttgagctggtggctgggaggcttgcttaggaccagggctgcctccctcttcctggccccacctgcccaccccaggctgtacaggaccctgagcagtcatccctgggcctcccctggcctcttccctcctcctgtccctcccccagagacacaggttcccttttcatgtgggaagaaagctgcccacttgtctgcaggaacagctgggccttgtcccctcagctgtggctgggagcctgccgcggactgcacaatcctggctgtgtcctggggaccctggcactgacggaattgccttggctcaggcccaggagctgcagggggccttgggccagtggggttgaggcggggccctctgggagcccatttcttcagacctctgctttctctcacacccgggggctggtaccggcagaggggagggacactgaggctgaggctgaggctgaggcyggagagcagggcctgctcccttatcactcctaggggatgtgagccacagagagaagcagctgcagatttgctccccacataggccccctccctgagcttgagtcccccagggggcctgaggctcttcyataggtgcacaggggaagaacagacggagacagtagagtcagggacaggtccccatctaggccttgagggtagcgtttatttctggctcttctgacttcagcccatgaggctgggcagctcctcccactgtgctgtccccagggcagaagccttgacatgctgttgaaggccactgcatccccactggccagccctgcctcatctctctccttgggctggcctgtgcactgagccaggtttcctcctcggcccatasatgaagggtttgctttgaacccgcattctatcaagtgctctgcaaacagcaccacacacagcatcaggaggccagcgctgtgccagtcctgactgtgcagaygcagaggcgagactcaggaaggtcaagcagcttgcccagggccacagctggccacaggtccttttcacgccgaagcatgtgctcaggaccagtgggttccaccgctgctccatggctgctccaggtgtcttggttccagctgccgtttcttctgcctggaaagttgttttctttatccagatgacaactgattattgagtccttcccctgtgcttattcatggtcttccattctagaggggcagaaagatgataaatgtgaataaagagaaaaatcagacagtagagaattgaaagaggggtgtgctttgggcgtgactgggggtgcacttgagcagcaaggtcagggaccgttactggggactggatgacaaggttggggaacagctttgtagaaagcagaggaaagcatactgggaagtggggagagccatgcaaaggccccggggtgtggcgagcaccgtgtaccctgaaaatggtgagctgtgcgtctgggactgcaggagtgggtgcagggggcgtggaggatacatgattgctgaagctgctgccaggaatgggcgtccatgtggctttacgtccctggactcgcttgtcctgtctgggcattgggtccccaacagccccctgctacccaggtaccaaagctggagaggagtcatggggacgggcagacatctccactcaagtagctgaaggcttgccataatcagaagagtcaamctgctgcgtgtggccccagagagatgggactgattgtgggaggtgagtttgggagtgtttagcagctgcagatatttgggaatgagaggggtcatctgagagacagtgagctgcccgtccctggcagaatctaagggagctatgcctcgagtcagaaactgttcgaacagctgaccccaggggacggagcagagggagctggggcactgaactgggtgggactggctcaccctgggggctctttagtgccatctgagctggaggaagggtgcatgctccgtgcagaccagggccttcgagtgcttgggccacattgcagggctggctctgaggtctgggacagaatgtgtctggtgcttaataaattttgtagcttgattgatttcatcctrgccctggaggaaagtgaagggaagatttcttggtttgagaagaccaaattaggaacagatgtcttttcaagctattaataggcggttggggaacaatggggcttatttttaaaggagcccatagcatgccggttgccgccgtccactggaacgttccatgttggagcattttgtattcttgagggtggagagtcaatgactgggtcccccaatgctccactgaggtcacgatccaacaggtcaaatttaacctcttcctctaaaccactccatttcccatcaggggctccagaacaccccacgattctgataagtgggtactgccaagaatgctttctttccagagaaggtgtggttcaagatgtgcactaattggcccgagtcaccctttgattcttcaagacagaagcctggggtttggctcttaggcaaatcagtataaaccaccacggaagctattagcagcattggtagcaggattcacaactgcaattgttggaaatgaaaattgtcgatggctctgtgcatgcgtgctttctctctcrattgcaatttaaaaactaacaccacttagctcatcaaaaataatcctagtgaggaaaatggctttgttttaaaagatccccaacattttgccttaatgtgttcctttgaagaaagtaaagttaattatgatgcaggcaagagagttatctgacttgatgtaacagggtggattgtgtctgtgtccccaccctgtagtgtgtacggacatggtggtggagagagttctattctggggcaagtgcgccttccgggcaggccacttgggcagtcagcttcccaggctcatggtggctgcaggaaatgcagcaccccaatacccttgctgactgttggtcatttttgaatgaggcccaagtttctctctgggactgagccctgctgggatgcctgccccctccctgtcactggggcttgtctcagccctgcagaagtgcctgcctggagacacagtggatgctgttggcatgccccctgtacctcctggacacgcacrgccaccctgcacaccagccaccttaccctcrgttcctgtgactcagcctgtgggctccctatagccacggaggcgtgtgggcatcggcatcccaggagtggctccagccagtgacggatgaatggagtggatggataaatgccgcagcttcctcccgtcttatgtggcccagctctgagatgtgtcctgcgcagttgccaggggtgtcttgcaggctcaaacccccattgcccaccagtgacctgctcgccaccacctcccgtgtcctttctcccctgtctcacttcctattccattcatgaaaggactgagcttacagccgggtagggggttggagaggccgagaggatggggggcatctggtggggtcgggaggtctggctgctgctctgtgggcgtggtagggtgcctgggkctgggcactgcccagtgacttgaagggtacatcacctgccggcttctccctccgaccccactcatgggggctcctggcatgctcagtggatgagtgtgtgcttctctgaggctgaggggttgagggccctgctcagggcacatctytctggggaggggcacctttgcccccactttctttccactgcacatcagtgcagttcgggatgaagccaggaaaacaccctgagatggtttgtgtgtgcgtccccgccaaatctcatgttgaaatgtgaccctcagtgttggaggtggggcctggtgggaggtgttgggtccgggggcagatccctcaggaatggcttgggccatcctggaggtaacgagggagttctcgccctgttacctcgcttgagagctggttgtttaaaggagcctggcccctccccgcctttcccaccatgtgacatgctggcacctccatcacttttccctatgattggaaacttcttgaggcctccccagaagcagatgccagcgccatgcttcctggacagcctgcagaaccgtgagccaaatcaacttcttttcttcataaattctccagcctcagacattcctctctggcaacataaaacagactcacagtcccgtccagatgctaaagcctgtgcagggtccacactcagggtctgttcttgccagtaagaagagcccagggctgggcatggtggcttatgcctgtaatcccagcacttcgggaggccgaggcaggtggatcacctgaggcctggagttcgacaccagcctggacaacatggkgaaaccccatctctactaaaaaataaaaaaattagccgggcttggtggtggccacctgtaatcccagctacttgggaggctgaggcaggagaattgcttgaacccaggagacggaggttgcagtgagccaagaccataccattgcactccagcacgagcgacagagcgagactctctcaaaaaaaaaaaaaaaaagagctgacacrgagatgctctgaggccatggccctgaagtgggcatcatgcactttgctgagtgctgtcttcttgttggcaccagcagcatccttcctcttgsgggggacatcttcccttactcaccatccaggtcctgggggcaaggatggggctggcacccaaggaagggcacatgccccaagctccaagccagcacctcagcaggagttttcaactgggggctgagaaaaggccttgccccagccttcatcaccctagggaggctgggagcttgtgagctgggacctgtgkctgccacagccaagctcttcagaggggacaggtctgcaagcgtggtgctgatcctgggaaaggcggatgagagatggagactatcctggtgatcccagctgtccgcagcatgccagcctttcctgaggtttggcctgtaaacctacaagccctccctcttccctgatctggctcaggctgtgtttctgtcacttgtcaccaagggtcctgactgtcattcctacattaagacagattcgtccagcctccaaggcccccgctccttgtaatcctggtgaccgatggcagcagccccatcgtctgttctgtggcatatctgttccagtcccaccactcgacgaatgtcacttgtcaccagagcatgctaaggcagtccccaatccaatcaagagactgaggcagtcctcaggggaaccaggctgatgagagaatgaaaaggacaagagccagccccttccactgcacgaggcacatgggtccatccgagggaacggggtggcggtgagctgttggcgtccggtcaccaccatggtgcccagctgcactgtcttggagagccctgactccggcagaggttggagcarggagggctggggctgccctgtgtgttggttcagcccatgacactgatgctcagggcagctgggagcacagagctgcccgggtgtactgggacggtccaccgcagagagatagtgccagagccaccctgggcacccgagttctccaggcttaaaacctgctccttgctccccatgcacatgtgtctgtctcatctaaccttatgtcctgcttagggtttggggaatggggttaccatagaaacaagatgtacacaagtagcctccgtgctgggtagccaaggatgctcgccatttaagagcctctgaggtcttcaggaactccggagctggagtggctgtatctgcggggaggcagtttgctgagtgctgtcatccccgcagggatgccctcctgaacgggccaccctggggctctgctgcacgcttcctggggagtcttctgagggctgactcagtggtcacagtgcatctgaaggcctggacttcaggagctgccatggaccatttcccaagcccaagttgctccctgcatagtgagtctgtgaggcctcagtatccttcctgaaaatcccctctgtgtaagttcccagagccggcttctgatgggtataccagctgacccagtcttctaagagtcctcggcctccaggcgcctttggaggctgtcttattcaggcaattggtcctgggagaacgggcattcatggtaaccagcctcagtggccggtctcttgcagatctctgtatctcttactgaggaagtccctcctgctatctgaccacacgccaacctgctgccaaatgtgatgatgatatcacaaacacgcatttgggctcagcgttttaaagaggaagaatcattcagagatctcactaattttgtcttctaagaaccaggggaggattcctctggaccagaaatggatctctttgtttcccatcttgctccacctctgtgggggttctcgtgccggaacctggttgtgtcaggcctctccgatgtctggaatctcgagctgtttcctggrgacagatggcattggttttgcatttgttccacaatgycgtctctcagaaaatattaacatcagctattgacacggagctcctcaaaatatcagcaatgatttgatctgcaactttggaagctatttggtaggctgttcggcatggggcagttttgaagaatgcactatctttcaagcagttagggcgttgtggagaatcattaaactgttgcttctttggagtgtggtcatcttgctcctgatatttttgacagtttggctgtgttttagttccttcagtaggagagaaaaaggactaccagcttcacatcatggcacagtgggaaaagcactgagccaggagcccgcaggagtggcagctctggtgctggccctgctgccatctcttcatgaccttgggcagatcatctcccctctttgggcctcagtttctccattggtgaagggggagcttgatccatttcttccctgcatctcgagatcagtgagatggtgggagggtcaccggtgcctggatgtagaactcaactgctttgtaaggaaggagttggctagcatggaaagtcacctgggcttatttgaycttgagcacctgagtggccttctttacakgcaaatataaaaacaaaggggatgccatggccctgcagaagggatcccgcaggacctgctgttctgacctcacagagcttcagggctggtagcyggggaagagggagcttatttgtgtaggaccaccagtcctcagccccctgaggtcacacccaggcctggccttagcaacaggttctagattccagcaaaatggtttgtgacactgagctgcccatgaggactctatgggaaagcccattatagcacaggacagctgggggaccaygttgggtccaatctctgcatgaactcaggaatcacaagggctgcctcctcccacgggcttctcatcccccaagacttcaccrtgcttttctgtgtcattctgctcagggaagtttgaaatgccatgcctggggcagacacttgaagaaatcagcttggacaggagacatttagtgctagttagaaggtcagccagtcctaactggcaggggtggcccaaggcagcctgctgtcaccagtgcccggcccttgtctagatggccaccttcccccgctgagaggtatgctctgagagaaggtgagcacccaggcagagcccttgcctgccttcagctcctgtaagccccagagccctgaatggtgccaggcacgtggaaggtgcttcattcattcactcgttcatttgttcgttcggttttgaacasccagccaggcggggatctgggctgagggtgttcagagataggccacattcagctcttcaccccgagctcacaattggctggggagccaggtccccatgacatgcatgggaagcagggaattccagtggggactcagcaggctcatgtgtgcaggtgcgggtgggtgcctctcacccttgcattcaccccatttgcttgggcttttgggagcctcaagcttcctccaactcactgtctgcaaacagcaggctttggtgccaaccacacacagtagccccttagcacctgctcccctgggaaagtcagcctgggccttgaccaatgtcctctgcaaagtgttgcttggcccgacccctcctgctttccaccccagaattttccttcctagcaattagtgggagagttgagacccttccctcgaggtctttwgaagcagaagtaggcccaggggcaaagagggyggcctctgtcaccttgccagaggtggcttttttgaagggtgagcctggtgactggatgggggcatgtgtttcggtcatgtgcagccagtacatggtagcrttttgttcccccaggtgtcggctcagggacttttgccacgtgttgactgctttacttcataattagccttgagaattgagcaggtgagatcaatcagaaacagtagtacgcctagcagggaattatttataggatagagaagttgccaaatcccaactggaagggcctcaggaacctgctttattgggatgcttgcagttatagctgaaaaagaaacatatcatatacttataaagcaaagatggcgatttatcgactcagtcaacaaaaggtcaggcttcaggcatggcttgatccaggggctskckctctctctctctctctctctctctctctctctctstctstgtgtgtgtgtgtgtgtgtgtgtgtgtgtgtgtgtstctctctccctgtctatgtgtctgtctactttgctgtttgggtttaatccagagattctcccttccctagtgattctggcaaaagtcttagaatgagtggcctcaaccaagtcaagtcatgtttctatacccgaacccctggcagtggccaggggactggggcgtcctaactggccagattggggtcatgcatctctcagaaccacagcgacttgagggtggtgaagcatgctgagcccaaggaatagcaaggtgtcrttttgggaggtggcagrtctgggcagtagaaagaccatgtgttctctgcaggggtgatggagcccaccgtccccactggcaggcatcccctccacagcctcctggacaggggtgtgtctgggccctgcctggacccatgagtgatggggcagctctcygggccctcctcacgtcggtcctgcccagcactgtcctggctgcagctcctctcacttgccacyatcccagttccatgctgggacctgcacttcaggccttcctcagctctgagaggcaccctggtgctgaagaagctctggggaggaggccccaagctgcctccttcccagaaggttgtgcctagtccctccactgctctcatttgaccmcatctggtccctccagtcctgcccacccctccaggagagccccagccttcagcaggaggccagccttgcctcagcagccctctcctcccataccctggactggccacctctaccagtgcctcctgggcggcagcaagctgcttggccctggggagggactgagcctgtctctcccctctgtcccagggcatggaactaggccagcagcagaggcctacccctgtgccattgctcaaactcggctcagggacaggggtgctgcagggaggggcaactgagggagtagcaactgaaaataagactttagggcgagacaggatggggctgagatcctgtttctgactcgactactagctggatgcccttgggcaagtttctgaacccacctgagctcatctacacwtcatcaaccagcagccaataatggggtctgacacggggggtgtgcctgggcctcgggtggaagcctctaccgtccagcccagtaycatgtgccatttttttttttttgakatggagtctcgctctgtcacccagtctggaatgctatagcgcaatctcggctcacyacaacctccacctcctggattcaagcgattctcctgcctcagactcccaagtagctgggattacaggtgtgtgccaccaagcccggataatttttgtatttttagtagagatggggtttcaccatgttggccaggctggacttgaactcctgaccttaggtgatccacctgcctcagcctcccaaaktgttgggattataggtgtgagccagcatgcccggcccatatgcctattcttaatttaccattgctaatgagagttcactgcatgctggaacctcagagccgcaggccctcttattcaataggggaaaacagagtcccagagactgggggagacttgcccagggtcgygcagtgaggccagggaaagcctggtcttctgacccccagcccagggctctgaccactgtgacctcagggatggcccattgactcctgtcaattcctgtgttgatttctgaagtgaatccagggctatggaaragaaaaggggagacaaaagctgaacccttttcagrcaaartcatagcctgataaggagtctgttgtgtcaaatatccccccacctcctgaggcgcctcagagagtcagagtcagagcagcccctggctggcgtcaccacactgctgcagggatgtgggtgtctaggaaggtggccactgatgagaggggcttgggccttgtgaaggcagataagagagttggacattcaggcctaagagctttggcgcacttccttctttccttccctccctccctccctcctcaccccttcctttccttcttctttccctccctcctcaccccttcctttccttcttctttccctccctccccaccccttccttccttccctccatttctccctccctcctcaccccttccttccttctctccctccgttcccaccctttccttcccttcttcccttcttccctccttacctgcaggcatgnnnnnnnnnnnnnnnnnnnnggcgggagggaagaggaaggaagaagagcgtgagtaagagcaggggcgagagcggggcagagacaggagagagagagaaggaggacggactagaacatacaagagagagcgcggggcaaagagcggaggaagagaaacagagaagaaaggtgacgtggacagcaggagcgaagcagcgaagagacgagaaagagaaagaaataagacggaagagtagtgacaggagaggaccagaaacagagaagagaggtgagtaaagataaaagtagaatgaaggcggacgcgggagagaagaaagaaagagagcgaggagagagaaaagaggacgaggaagggagaagaaagagcgaataaggaagagaaacagagagagaaacgaaaggagaagagagtacagagggtaaacaacgagggagaggaggagagaagagaagagagaaggagagagaacaagaggggagagaggagagaaaatacaaataaacagaagagcgaagaggagaagataaaagagaaggaaggcgcgaaaggaacaagagaaagaggagagaaagggaacgcggaacagaaagggcgaaagagaaaaaaggaaagagaaggacaaggcaaggaagaagaaattatagtgagaacacaacgggagagggacaaaaaaaaggagaaaatgatgcagagagacgggaggagagatgggggtaaatgcacaagcgccagggaggagaaaaaatggtagacggagaagacgacagaaaaaagaaggagagttgaggggccgaggaagacaggaaggaataacgacacacagggggagaaaggaagaaagaaaagacgggacggaagaaaaagaagagaggagagagagagagtggaaaaaaaaagaagaaggcaaaagaggaggagggaaggagagaagaaagagaaagaaaaggagaggggcagtgagaagagaaaaaagagagaaaaagtaacgtgagaaaggaggagaaacaagaagagggggagagaatagaagagaagagaagaaggcgaggaaaaagaaagaaggagagaggagagagaaaagaagaagagagagggagaaaggagacgaagaaagacaaggaagagagagaagaaagaggggaagaagaaaaaacggaggaaaagatgggacaaaagaaggaaaagaaagggaaaaaaatgaggtaaatgggaagaggcaagctagctacactgactgactaacaacccgttccttccttccccccctccctgcccaccccttccttccttccctccttccccaccccttctttccttcccgctctccctccccaccctttctttctctccctccctccccaccccttcctacccttcttccctgcctccctccttcccttctttcctcccctccctccccatcccttccttacttaccttcctccctccccacccctccctcccttccttctttctttccttctttccctccttccttccttttccttctttcctccctccttccttcctttcttccccttttctttccttccttccttcattccttccttccttcttcccttcctccatccctccctcccttcctttctctcccttaaaaataatgcctttattacttctacaaaaatattacatgttcataaatgattcaagtgaaagagaagcaaaaataaaagaaaaaagaataattatacacaattcaacatctcactatccagaaataattgttaaaattaactagtggtcrttccagatgtctctctaggaatatatcagatacatgaataggagcagtgtgataaagtggaacaatttcaatttaattttatttcttagagacagggtctctgtcactcaggctggagtgcagtggtgtgattatggctccctgcagccccaaactcctgggctcaagcgatcctcctaccccagcctcctgagtagctgggactacaggcatgcacctccatgtctggctaagttttataaagttttaaaatagagatgggtgtcttgctatgttgcccaggctggtctctaacttctggcctcaagagatcctcctgcctcagcctcccaaaatactggaattacaggcakgagccactgtgcctggcccacatactcctttaaaataaaatggttgaatttttcttagttaatagcagcaatgaaatatctgaagtgaaactgagacaatggttgaatttcagagcaatgtttctttgcctcaraaaaccatcgttcttaaaagagttctgaagattgagggaaaaaaggttatggaaaaaataagctgggagtcattttatttaaaggatgtttccattctagacaatttcaacgggctctgtgctgttgaaaggtgaggaaattaggagtttttttttttttttttcctgaaggtcccctactaatttttgttcactagtctttttaccttgtctatatttataatgtttggattctcttctgcagagtttcttttaattctacattttgttgcattcagttctcatcatttttttcatgacttttccattccaaggctttttsctctatgttgaggctctattttattgtgaaatggtttttctttcttttcaarcatcatgggttctgtgttgcctgtgtccttcatgctagagaatgcctgtctcttgatttttatattttaagkacaacttgaagcatatttggttttccctttaaagctgcctttccatgggttttgcactagtgtgaggattccctccccctcccyttctttccctgcatcttccctcccccaaccccaatatccagtttccttttccttgtgattcactttgcccrgatgtaactatcacagagattttaaagacacgcacatggctgcggcactccctgagttcttccaggctctttgagaatgtttgcctgtggctttttggctccaatgacaagtcagatgaccacagcattacgggttcctattttcactgtgatttgtggatgttgctccgttaccctctggatgaaacttgccgaggaagaatctgaatccagcatgattttatgagtcctcccttcccccgaaaattcttctttttcctctgtgagtgcatgaagaattattttctttctttaaccattgtatttcctgatgctcgtcatttccaataaatttttcttgaacatgttgtgccttttggatataaacataaagtccttcaccttgaaacaaatgtcctatattatgtcttttgatgcctttcttctttcatttgtcactcatgcccccagaccaggcaggaaggaaataggtgtgaaaaagtgggagtgctctcacactcattttaaaaggcacgtctgttccaggcaccaacatcagagaaaagcggccaaagactacggtgaatgaaactcaatttaggaacaaacattactgataaaatattagtctatcaaatcaagaatgtgatcacaagaaaaatacatacagygtgttccagtgtgacttattccagcaacaaaggaatggcattaggaaatctactaatgtaatttactccattggtagattaaaccatgtgactccaaatagaggctgaagtagcattcgatgcaatttaacacccattcatgattaaaaagaaaagatgattagctgtcttagccagttcctacttactgtccatttgggagggagcctggagagccaccgtggctgctggaagagcagtttggagagtggccarttgttccagtttgcttgggactgagggttttcctgggatgggggactttcagctctaaaactggcaacctgggatgggggtcgccacattgagggtgttggcagcagctcagcaacagaggaattaaagaatgattaaaytgttctgcagaagaaaatgagttttttttttgttgttgttctctagagggagggagacgagagaaagagaggcagaggattgaggaaaggggcaagagggtgtgagggtggtgtggatgtgggtgagagtgcaggccaaggctgttttaagaacagtggtgcctgatgctaagtgtgtctttgcaatgagagctagagagccccatctccacctcctcccctgcrgcaggtactggtggtgcccagattagccccagttcctgagctgctgctccctgccctggctgctgtgtgttggctgttgcccttcatatagtttggatgtctgtcccctccaagtctcattttgaactrygatccccaatgctggaggtggagcctggggggaggtgtttcataggagtggatcccccatgaacggcttggtgctgtccccttggtgatgagtgagttctcgctctgttagttaccaggacatctgatggttagaaaaagagcctggcacctcctcctttctctcttgctccctgtctcaccacaggacacatctgttccctcttctcccaccgtgagtggaagcttcctgaggcttcaccagaagcagatgctggtgccatgcttattatatagcctgcagcaccatgagtcaaacaaacctcttctctttataagttccccagccttgggtattcctttatagcaacacaaagtggatgaacacaccccagaatcactttgktctcactacaccccctgctccccatagctcacagctgagtgacaaaggagtacaaaaccctggccctctttctgtcctgctaaggacacaacccaagtctactcccttcaacaaagcctgsaacacttagaaagttgtgtgtgcggccaggagcggtggcttgygcctactgtaatcccagcactttgggaggccgaggcaggtggatcacctgaggtcaggagttagagacccacctggccaacatggtgaaaccctgtctctactaaaaaatacaaaaattagctgggcatgctgatggttacctgtaatcccagctacttgggaggctgaggcaggaaaatggcttgaacccaggaggtggaggcttcagtgagctgagatcacaccactgcactccagcctgggcaacatagcaagactccatctacagacaaacaaacaaacaaacagttgtgtgtgcatgttgaggatggggctgggtgttctcatttgagtcaacgtggtgaggaacagagacagtgtcagggaagcaggattctgggacagggatgagcacaaggatttgcagtgatcttggggagggccttggacttacacagagtacagagttggagctcaggccagtcttacccagacctcagtgggaagggaggctcctgcctccctctgcggtgcatacatgagcacatggwgactcgatggggtcaaggaatttgtctaacatcyccaagtaagagtccaggctgagtttaaaaactcagtctggaggagtcaaaacttgagctctaatcaccaggctgacctgctggatgtgtgactctggactggctcygtcccctctctgggcttcagtttccccaaggaggctacaggaccagggagcctccaggagcatttccacttctgatgccagttttggaggaagtgctgtggttgcttggaatgggtgagggactcgagtttcataggacrctgtaggtaggctggctgatggcgaaggtggaggatgagctggggtttaggactcacaggcagtgtagcttattgcacacctttttctttaaggacagcatctgcttctaagtaggttacgcttgctgtggcttgtttgcatctttctttgcttagaaagcaaaccctttcttctaagctaagcytcctcttaggcctatgggattagcacatagtccagattaatggggtccaaattaatgtgatttatcrtcatggttttcaaaagatgtggtctacttatacagctaccacttttttttttggacccaaatttaggacacttggaccaacaaaagatattttcttctcagtcatgcatgcaaatatatggaagatcttagaaaattgtggaaagtggggcayactgaacaaaatcactgccatcagagagaatgaagtgatgcaagatcaggatgtgtcaggaagcccaggcgtgtgtcgccacgttgatctctgtgtgaaataggacggactcagtacctgcagctagacaacgctggagaaactccaaaggactgagtgccgcccwggcttcaggagagtaagacaacagacactatgcacttttctaatgtggccggcactctgtgcttgcaatcacatatgtgccacagacaggatttctatcaaacaaacaagaagaacagatggatgccaagccygttgtcwctttcctggtgcgtttaacaggagccaggggagaagtccagtttggggcgtcttgggaagtttccacatcatccatgaaattctgtggtggacttgtcacccacaccatgggtgggtttgatggcttggtggtcggcagtgcaatgaccacaaccatgttggcttttattactcacaacaccggggatcgttcccagagcagtgcttttctaaacactggagaaagcagggcttgcattgggctggggagctgagtcattgcatgcagaggcggagtcaaggcgatcgtagatcatgcttccacatatgttgcatgtagagaaaacagcctcctctctggccatggattctagtatggtaactaggagagttccccagagttcatctctggatccaatcagtttttgttttaccagagatgagctttttgctggaaatttttgaaacaacaactcaaggtgcaaccgttactggtgggtacttttttttttttttttttctgagactgagtctcactctgttgcccaggctggagtgcagtggctcgatctcagctcactgaaacctctgcctcctgggttcaagtgattctcctgcctcagcctcctgagtagctgggattatcggtgtgtgccaccatgcctggctaatttttctatttttagtagagacagggtttctccatgttgggcaggctggtctagaactcctgaccccaggtgatctgcctgcctcggcctcccaaagtgctgggattataggcatgasctactgtgcccggccactagtgggtagttttgcactgtgtgtaaccccaaacctgggaccctgggatacagactgatgaccaagacaaatccagtgaagaattacggatctttggactcatctccaactgtttctgggctcagctggcatgagaaaggagtctcagaatgcccagctccaccagaggtgcccagcacctcccctcactccacacttaggaagcaatgtcgtttcctgtgccagtcagctctaaatgattatgtaattacatttgtgaatgtaatcctgtggggcatcattctaattatagcccacaatcctttctagcagtgttcagagaaataatatgtgcgatgaagtggggctgctctgtgtactgcaagaatgtccaggaacctgagcacatgcggtcgcacctgccccctggaatccacatgcccttggctctttcttaaaaagcggatcaaagggtccagtccatggcagccacttctcagggcaggtgcaattcagtgcatgctttaattgcaggtccccaaagaactttgcagacattcttttctcgttgttcatgatgcattctttaaagtaattttgagtgaattttatggtatgtaaattatgcctcaataaatttgttaaaaataaagtggttattaagttaattataatcaacacagacatgtgtgggtcacayagacaatcactgctgcaggccaagggtggatcatatgagatgaggatgatctggaaggttctgaggtggacactgaaggattctaaaaattgcttagcaggtgtgttcaaatggaacgctagcagacattcgcatataatatgctgtttctcttccgtttttccttcctttcctcttttcttccttctgttttctttcccttcctcttctttttccctgtccttcgtttcctcctcttccacctcccctacttcctcagcatctcttattattttggccttgcttcttgataagagtgggatctttccaatagtrctaacgttttgtagagattattatttgacgtgcactcacttcaggccccacatgacagtaagcttcctggagggctccatggtctggcctctgtccccagggagtttattcattgactgctggcagaggagacaccaccacaagcacaaggaggctctcggtcttcagtcatgmgccctgtggtcacaggtgccagggagtcagctgccctgactaacgtgtcagggggcccacctcagccagcactggagtcagcgggttcctctgccacactcatgcagacagcatgctgtgttcctcaaaatcgctcattttcaactttctgtagtacttgattcaggctttctgccctcattatggtcttttcagttcatggacattttgtttgtttgtttttgagatggagtttcactcttgtcacccaggctggagtgcaatggcgcaatctgagctcactgcaacctctgcctcctgggtgcaagcgattctcctgcctcagcctcctgagtagctagggttataggcacgtgccaccacgctcagctaatttttttttttttttgtatttttagtagagatggggtttcaccatgttggccggaatgctcttgatctcttgatcttgtgatctgcccgcctcggcctcccaaagtgctgagatyacaagcrtgagccaccgcgcctggccttgcatgggcaattttgtaaaataaattatacttttaatatttaatgattattgttagtatgaattcacctaattatcaccatcatcggttcaccttttcaaataatctgtgttggttacaacaaaccttatatgtatggtggtgatttagttagtttttgaatctggcatctggggttgagagagagagagagagagarcacacgcaggtgttctgtcagagatttttctgtctgattggttggacttgttctagtgggtggggtcaaggatactcattcacaagttttagtctggctctgacattgaagttgtgctacattcatttaatgttttacatagaaaataattttacgtagaaaatagtttttgatgtcaggaaatattctataatgtttatttaaacagattccataagtaaaatgatctacagcagagtctcaagcatctgtattgccttactgtgtgcaaactgtctgtgggtaaatgaaatgggaacctgagcatttattttgctcaggtggagacagaagcctctttctttctcctactttcttgtgctacattttatctcctttttctaatgattgagtagactcttcagttcatttatttttattctcgtttagtcatgagatcaaacaaggctattcattttcctctgagtctacttttggttgaatcctgtaagctttgattgatgctaagattgtcattcttttctaaatagtgtgcaaattctatttaacccaagagtttwgtaggagacttttagattttttaaattaaaaaaacctaaatgggctaggcgcagtggcacatgcctgtaatcccagcactatgggaagccgaggtgggtggatcagctgaggtcaggggttcgagaccagcctggccaacatggtgaaaccccgtctctactaaaaatacaaaaaattagctgggcatggtggcaggcgcctgcaatcccagctacttgggaggctgaggcaggagaatcacttgaacttaggaggcagaggttgsagtaagctgagattacaccattgcactccagcctgggcaacaacatagaaactccgtctcagaaaaaaaacaaaaacaaaaaaccaaaacacacacacacgcaaacacacacacacacaaaaccctaaatgattaggtttttaacattaaacattaattattctcatctagttttattatattgtgatgaaagaatgtggcccatatcattttatatgattttggaacttatagagggtattttttgtggtcaaaagtatttattttggtcatgaatgctgaaaawgtagatgcattttctgtagcaaatcaaatttattaacttatagtcagatttcctatattttttgttmatcttggtttttgctaacttatcctgtccatggcagaccaggtgggctgagtgggggctctgtgtcccaggggccacggtggtggactggtgacaatgtggacctgtccatccatcctctcttccttgcagtcctgcatggggaaaagagctcgggagtgaggtaatgtggatttgaatcctggcttcagccacccctcaccattgtggccgggccatctgtgaagtgggaatgggagcatgaacygggcagggatggagggagaatgaagtaggacaaggatagggaagtctgccccctccccttgcagccccgctctcatcccagtagctcctatccgccccataccatgcatccctgaaagctgcccctgcatccgggttgataaaagacagacagccytggaggtggagtaatgcagacctcctcctcaggtgggctgggggctgttgcagacctctgagttttcaggcatagttgggaggttttggggacttttccaggatcccctttcaaatcctacsaggctggaggctttctgttagcctctgacttaggacagtcttaccaggccaagacctgctcctgggrtacgtgcctcacagttaggagtccctgcaggacttccaggcggtcagcaccacaccaatggggatcccgtagatatgggaagcagctgcagttgtaacaggacccagttcggctgtgtactgcttaaacatcaaacacaaggggtgagagttggtgggaggaaaagcaggtttattcagaccagccagcaaaccacaaagatggcggactakcgtcctaaagtaccatctttagttaggacacatttcaggttctttttaagttaagggcagggaaaagaaaagggggctgggattaagaggtggtagaggacttcagacgtttgggcaccagcgaggttccgaggaggttgggaacacatttgtcctcggtcaggtggcaatactcctgtaatctttaacaaaacatagttggttgttgacagacttccctttagcctcagtgttagcttaaaaaaaacgacatgattgctgtttttgcgtaatttaactcagtgctctaaaattatcttagcctgtgggcagcaatgggtcaaggccccttaaacaaaaatggagtgagtgacgttagttcttttgctgtttcactgttagtcatctagtggtctgggggagacaggaacctgggtccccagwgccatggcccatgggctcagcccatcctgctgttccagcccagtgccttccctgagctcccaggccccagggagggtaggaatgggagctcactgggtgcagatccaggagaggccggctggctcctcactgtccctgaagcaggaagctccaggtaaatcagagtcagctggcagcccctggtgaggtcagaggtgcagctgacatgcgcatgctgcaaaggccgagatttaggccgaggaagaggccaggagctccagaasccctgccaggctcactctctgcctctgctgcctatagcctgagactgcyagaggggatcccatgccctgccaggcctcacaggagtcctccccacacctcctctctgcagagcctttctacggcccagagtcagaaggcctgatgtggtgtctgctctgttgtgagactctggcctcagcttcatyatctgcaaaatggggctggacagacctcttcttcctcaggatcaaacatgatggaggctgagggactttggaaagggttggggggacatcgaggggctctgagtaatggcagagaaagcaccttagggtttctgggccyggctgcctgcacccatcactcaagcatccatcctgacccctggagactccagctgttttaaaggaatatgtctccatcctaggtcacctttgtcactgctgggggcagcctgacacagcatttcaaagaatcagctgaggtcagatagacctggctgcgtgacctcaaatgagttccgtaagctctctcggccgcggtttccttacctgggaaatgggccctccttcagagggttgatatgggcaggaaatgacagtgtgcaargagtgctcaggatggcacaggatggtacatgctctgctgtgagatgagtgctggcatcgcctccccaggcagtgggcaggccctggmacactgcactgaggggcgggggggtggtgccctccagcctttctctttccccagattttatcatgatgagtgggattgttcctggggagcacagtgggaaaggaatgggctgctgggaatgatgttagcctatttttaactagagattttccctgttgtgagccatttgcacaaatttctcctgacaccagtccctctccacatccacccctgctcacctccagtccttggtttatcatggcccttgttctgatcctcccaggaacagtaaattgggctgctgaggccccagacaatgaaacaccctgacatgtaatcgtttccccactgtcctcttgtaagtctttgcagcccctccaagatctttccccatccaagaaataaatcagggtctcttctattcacatggaggagcctatgttctcctatggggttgtctttgcaaactggcagcaatggacaagaagagaaccgcgagacatgccctgaactggagcctggggcaggaagacgctgcccaggatagcatctgtacagcttggcaccttcttggcagactcaccaggtcagctggtcagtttcctggcagacaccaccatcccacagaaacatctcacagtcttacctccctgtgaggactttaaaatcggtttttattttggcatcattatagattgacaggaaattgcaaagacagcagtaagagaggtccctaaagatagaaaaccagtgcacccttcacttgcttttctcctggtcacatcttatgaaactggaactgaacccaggttcagctgctccacacttgaaagccaactttgggagacaagacttggtagaaggaaaagcaggtttattcaagagacagcaacctgagaaracagtgggttagtgtcacaaaggtcgtctcaagtcagcacacatttcaggctcttttgatgttgagggcagggggaaaagaagggagttgggatcaagacrtgtgaccagctgcagacatctgggtgcctgtgaaggtcccaggaggttgggaactcctctgtcctaggtcaggtcacagtgctcctataaatcttgaacaaaacacaattatttacacacttccccttcaatcgcagagttartttctgcccaaatccttgggagttcaccccttgyatcagcgtgccctggatatgaaacatggagtcaaaggagattattttggagatttaagatttaatgagtgccctgccaggttttggacttacatggggcctgtggccccttgrttttggccaatttggaatgagagcgtttgctcaatgcctgtaccgttattgtatcttggaagtaactaacttgtttttgagtttacaggctcataagtggaatggacttgctttatctcagatgagacttcggacttggacttctgagttaatgctggaaagagttaagactttgggggactgttgggaaggcatgactggttttgaaaggcaaaaaggacatgagatttkggaggggccggggcagaatgatatggtttggctctgtgtccccacccaaatctcatgtcaaattgtaatccccacatgttagggagggacctggtgggaggtgactggatcatggtgagggttggggggttccccygtgctgttctcatcatagtgagggagttctcatgagatttgatggtttaaaagtggcacttcccccttcactctctctctcctgctgccttgtgaagacggtatttgcttctcctccaccttctgctatgattgtaagtttcctgaggcctccctagccatgcaaaactgttagtcaattaaacctcttttcttcataaattacccagtcttaggtagttctttaaaggaatgcaaagatggactaatacagtttcaagaactacatgaatgcaatttttgcattttatytcagtgctttaaaattattctagcygacctgcaggaacaggtaaaggccccttaaacaaaaatggagtgagtgctgttagttcttttgctgctccactgttacataactatggcacgatataaaaaactaggaatttgacattggcacaatgtgtgtgtgtggtccctgttatttaatcatgtgggctacacaagtgcattttcatactcctccttgtgtctgtggcccagccttcttctgggccctgtgggagagaattccagacccgaggccactgtatatgcatttctgggcataaggggggcccagcaagtttgagcccttcctgaccccamggagcacttggtccagattcctgcctagactctacagatgtgttaccaaaacaccaggttttggtttaggtcctgttgcttgccacacagaaagccagtgaccgagacaatgagtagtgccagggaagaaggctttttcgggtgttggggctgaggagacagtagatcagtctcaaatccatcctcccaattgactaaaattgggagtttatgtagtaaggaataggcttccagaggggtaaagaagaggattttcagtttcttgatactatccaggaggcctgaaggttggtttcctgggaaaggaactcagataagacaaatgtaagtttcatgctttaagactgggagggtcaatttctatgtttatgaaaataaatccataaacatcagttctatggggaacctggctggtttcagatgcctcaggcagcctccgcagggtccagcctcagtgctctgcaggtgtttatggggtgggtgwgtggacagcaaggggctgactgggagtgtgtgggatggacatgtggaaaagtgtgtcatcaggagccygggctcctggcctggctctgcttggtggccctgtctgaggctcagggtcctagctgggaacatgggaacagcacagcagccctgacccctccgggggcctgcaccgcaatggatgtgactcctcatgtgagcagacgctttcctgcctcttcctggattcysggtgctggactcccctgctgaagctgaggtcatgagggatgggacagtttataacagatcttcaggcccagacggaaagaactgggattttagcccaagtggtaagggaggggtgccagccactgtgtaggactcagtccctcctcctttccctcctgatctggtcctctgggggagggtctggacactgctgagaagcactgatactctgctttatgaggtgggtttatggagggattaaaaggccccaaaaataatggtargggtggcaaagtgggcagagagcaagrgctggttggcttctctcctgacagaggtcagtggctacatattggtctctgagggcagtgggtctcgctggccacatgccagtggctkcaggggaggctgtgaaaaagaggctagagagactctcccgggtctccgccctgtggggaacagccatgtaggtcactcttggccctgcacaagggcaggtgtgccccacagcagctctccttggctgtggccatgtaaggggtccatggcagtatcctcctgccaactcctggctgctgagcatgggggactctgttcaytctcccaggactttgccaagactgcagagctgggttagtgtgaggagaggtggggtggcacccctcctgaggagtgtgggcccttggttccaacttttctctcccacatgatccctaaatcttcatggctgcagctcaggccatgatgggtctttccctggggatgtttcagggagtgtcttggtgaggggttgcaggcacacccagggatccagcrtactctagttcccagacctgctgacctctctaccctgtgagtgccaggaccctgggcagcccatcactgtcccactgtgcccttgctcttcactcctcactctttccattttgctcaggggtgatgagtttatctgcacagcctctcaaaactcagggatcatttaggcttctttttctacatccttgcagattaaggatcctggaagtgttgggcycaattaaggatcctagaagtgttgggctcaaggctgtctctaaaataatattttccagaaagaaagagtgtagaggaagggtcacgcatagaactccatgtggcctctggagtcggaaagcctcgcaagggtgtgggctggctgtgcgacctcgggcaagttactcaacctctctgcatctgagttccctcagctctacaatggggatgaccactaagcactggagccgtggagcttttgtgatgcgggaaaggcctggcgtggagggacagcttaatccatattgtggctattgaggtgtacatgggaaaactgagacccaggaaagctgcctgatggcccaggatcccacagasggtgayggaggccacgctgcagacaggcctggggtcctagcctgtgtccactctcctgggaaggggcgacgaggaaggggagtgagacccccagcgtgacagtctgcagggaggcaagcctcgcacgmcgcctgcctcacacccagaccctcgcctgcccatgagccccgctcgctccagacatcctgagcagatcagctctccgccctgcgtcttgaggcaatgggggattcactgggtcccaggaagggcaagcttttggaacaactcttctttatgagccttctgttcatccccagccagtggggtctggggaagggcggctcccgtcttcccattgtagagcaaaggcctcagcgcctgccctyggggcctgctgcagctctggggctggcacaggtctcgctggcccctagagggagctcgaagcccctccagctctgatctgtmccttccaaggagaagagcaggtaagctccggaggtctgtgtggcatcctgggcccaaattaaggaggaggtgtcccgccgactgcgctctctttggaccctctagtgcmcgtatgggactcttgttttttggctacagtcctggcgagccctcctctggactcactgacaggttcagatgcagaaagcaagaaccagccacaggcctggagggtccgactggttttctctaagaaggtggtagtgcagtggtcaggagcaggacatgagagccagttcgtccttcttcaatccctgagtgtccttcagcagctgagaggccttcggcaaattacttcacctctctgagctgcagggtctttatcagcaaactatcttaactcggattcctctgaaagagtgcattgctgggctggttatggctgcaggtgacaggggctcgcggtgtctgggaccccctgaggtacatgcagaatgcccctcaaaattgtccctccaaaggccacaggtagaggcctgcatccactgatacctgtatcccatgggccaagggttacttctgccccacttctgggtgagcagccccaggtcttggcccagctcccacgttggaagacttcatcctgtatccctggaagargcctggtagccagagtgtggagaggctgggcaggccctcgggagggctgctgcccgcattygtgggcctgcccaccatagtagctgctgacatctgggatagaccaaggrcaccgaaaacacctgcgccgctacctcatggtgttggtttagcataagcccaaacccatggacatcgagagacaagtagtcgggacaaggaagacgactttattttggagarccagcagccaagaggagggtagatgaatgccctacagaaccatcctaagtcagtacaaatctcaggctgttttgatgttaagggaaaggggaagcgggggaggttgggatgaaaaagtgaccaagggccaggtgcggtggctcacgcctgtaatcccagtactttgggaggccaaggcrgatggatcacctgaggtcaggagtttgagaccagcctggccaacatggtgaaactctgtctctactaaaaatgcaaaaattagccgattagccgggcatggtggctcacccctgtaatcccagctacttgagaggctgaggtgggagaattgcttgaacccgggaggcagaggctgcaataagctgagatcaagccactgcactccagcctsggtgacagagcgagactccatctcaaaaaaaaaaaaaaaaagtgactgaggaccgcggacagcctgctccagtaagggtccagggaggytgtgcaatcttctgcccgtgttcaggttccagggatgcatcttgaacacgtggtgttgctcgtgggatgccctccttatctccttgggggtgagtgttgggaagagaccatgatcgtctttgctttaaactataaatgaaattcctcccatagtgagcttggcctacatgcagagatcagcaatarcagttaacctagaagatatcatgtgggggtaggttaggagcaaaacggagctggtcatgcgaggccttctttcactgccacacaatggctgtagcatgggctgtctggcgcacagtcagggcaggataggcatgaggcatcttctatcatttatatgttgtggttgttttgctgtctgtcttagacctgctcttagccagcccgtggaccaaacagtagcccagaggccagattcatcctgcagacttgtttcattcagtccagagagcatttagagctttttaaaattagttgccactaataacaaattgaggcactttcatataaaaatggggagttccagtttttctgtaacttgccccatgggataggatatgaagtcatctagcatgggagctgggctaaggcttggggtagggggtccgggagccctgggaagaaaatcaggaggctgggcagaaggctccagtcttcctcttctccctcctgggagctcaggcgtttggttggtgtgcagaaacctgccgggcctccaagagccatttccagttttggggaatagctgccctgtgggttacctcctgcctagatattaagagggcccctgctgctctaagtactgtgtgtttttcccgatggtgataaaaaatgactagccaggagcttgactgccacagaccctgtccaggaaatagagttaagagcaatcagaaagactgatgggagaaaaacactgggattttcccattcctattcatttagccctttccaaggtacttaaacttctcatctattcacattaactgtctgagagttgagcacgggaagtgggagrtgggaggacagggtgggcaccgtgaatgtggcagcttctctagcttacaaggacccctgtgggctgagggggattggaggactggagtcaggggacaggaatgtacagtttgacytcagaataggccctgttctgcccctgcatttggggctgctgtcatggtgggtttgggactttggggaatgttgcatacgtatccaatatgatttctccccttagcctgttattggtgcccaatattctactactggggcaaagggtggcctcctgggactcccctggggcacagagtggctttcttgggtgttgactccatactgcttattagctgggtggccctgtcccaagtcaattaacttctctgagtcccatttttatctctgtaaaatagagacaagattaataagacttcccagaggtgttttaagcaatatgaaaaagccactggggatgggcttggccagtcattgagccgggtgtccacaggaagcacataggatcatgcccacgggctaggtcttttagggatgcccgtcttgtcttcaatggcatagatggggcctgtgataacatggttatgaggttcagtcacctcgatcttcaaaaaacgattttcaaagatttttggagagaaccagagagctggcttttatctcttgtggcagccctgtcccctgggaggccggcagagtatggagactcctggagccctcacctcctgaggcctgggttgctgctactgatactggaatttaaattcggttgttcgcttatcagttcccccagaaacctgtcttggacagtcgctccgggagctggcccggatgtccagaatatcagcgtctctcccacaatccaggcgtttaaatcacaacagcttagcaaggtgcttttacaaagagcatttattgtttttgtcagctcataaaagcgatacatgtttgctggggataattcggaaaatatgaaaaaaatgtaaataaaagaataaaattctccactatgccctaccctgagatagttgctttaaacattttggtgaatttctatttaatcttttcctccctcccctatcttttccttctttctgttataaaaacaattcaagcaaaaaaaaaaaaacggggaaaatgtagcaataatccatgtttccattatccatctatcttttaacctccttyctcccctctcttctctcaccttttctcttgtgcttcttctttcttaaggcaaatgattacagatagagctagagtcttttttttatacacccctcacccccctgcaggaccactccttgaaataggatgtatccttccttatcaggctttggatacttttgcctcatgtatatgtatccatgaacagtatacataattgttatgtgtcatccacattttaagtacatggggtcacacaatacatgcatatctgccacttttattgagacagggtgtcattgtgttgcccaggctggactgcagtgtcacaatcatagctcactgcagcctccaactcctgggctccagcgatcctctcagctcagcctctggagtagctgggaccacaggcacatgccaccatgcctggctaatgttcttattttttgtagacatggggtctcactatgttgcccaggttgatcttgaactcctggcctgaagtgagccaccttcctggaccttccaaagtgttgggattacaagcgtgagccactacamctggcctttaatatatttttatgcaacattgtatttctgagatatttatccctgttgagatgtacaccttcagttattttagtggtgcagttrtattttattatrtgaatatgccacgatcatttacctattcttccattgctgaactttaccttgaagcagccaacatctttgagcaggtcctcttgacttgtatgccatgttcctcttccatgtacacctggaagtggaagtgccaagccatcagatgtatggattttcaccttaatatcagcttgccaaattgtttttgaaagtgtttatataaattttaattcccaccaacaacttgtgaatgtttttatttcccttcaactataactacccttgatattgccagatttaaaaattttagctwatctggtgatgtgttctgatgtggtatttcatctcattgttttgatttgcatattttctgagtattagtgaaatgaagtagcattttatacacattcagtccataagggctttatcttttataaatttgaccattaaactatttgtaattgctttgtaggagttctttagatagtcttgatactaatcctttaatggttatatgtgttggaatatagtcctatgttataacctatcttttaactttgtatctttagcacacagaagttttaaaatcttaatataattacacatagcattttattatttctgatggtgtgtgttcctgatattgtgtttaagaaactatgatatgacatcaaaaccacagtcaacagaaccaaaaataaacaagtgagaatacaccaaactaaaaacttctgcacaacaaaggaagcaatcagtgaaatgaaaaggcaacctatggaacggaaaaaaatatttgtcaaccatatatttgataagaggccaatatccaaaatatatartgaactcatacaactcaataccaaaaatacaaagaacctgattttaaaaatgggcaagtagattttctcaaagaagacatacaaatggtcaacaggtatatgaaaaggggctcaccatcactaatcacggaagaaaggcaaattaaaaccacattgagatatcacctcacaccttgtctattatcaaaaagacaagcgatgacaaatgttggtgagatgtggagaaaagagaacccttgtgcactgctggtgtgaacataaatggcacagctattayggaaaacagtagggagtttcctcaaaacattaaaaatagaactggtgtatgatccagtgaccccacctctgggtatatattcaaaggaaatgacatcagtatgttgatgagacacctgtactcccgtgttcactgcagcattatacacaatagtcaagctatggcttttgtcacaacataagtgttgaaggatgaatagatgaatcatatgttgaaagrtatggtgtatatacacaaaggaatattattcagccataaaaagaaggaaatcccgtcacttgtgacaacatggatgaaacttgatgaaatyttgctaagcaaaataagtctgacagaaaaagacaaatactatctcatctcacttatatatggaatctcaaaaagacaagttcatggaaataaaggtggagtggggttgcaggggccgggggagggaaagaaggagagatgttggttaaagggtacaaactttcagttacaagaggaataagttctaggtgaacagtgtggtgaatatatttagtaatactgtatcgtatacttgaaatttactcagagaatagatcttgaatattctcaccacagcaaaggtaactatgtgaggtgatggatgtgttactaaattgattgtggtaatcatttcacaagatatatatatatataatatattatatataatatattttaaatatattatatataatatattatatataatatatattttaaatatattatatataatatattatatataatatatattttaaatatattatatataaaatatatattaaatatatattttatatatattatatataatatatattatatataawatatatatataatatatatattttattatatataatatatattttattatatatattatatatattttatatattatatataatcaaggtatcacattgtacaccytaaatatatacaattttatttgtcagttacgtgttactaaatacagagggaaaacagaaattctctagattacatttttacattcaaaatgttaaaattcctagaatgcttttttgtaaatagtgaaatgtaggactatatatactgtatatttatcaatatattctatataaacattaaatatttttatatctatacacaaggatatatatatatttaacatggatatacatatacatgtacatctatgtatgtatagatagatgtatcattgtcccagcaccatgtattgagttcacttttctttactaatttttaatttcttttctgttatctatcaagtttttatatttacttgagtctgtttcagcgctttctccttgttccgctaatctatttgtctgttcctgtataatgccacattgtttcagtgatgccaactcyatarcaaatcttattactggttacatcctctttacattgtttacactttcttttaaaaattgtcttgtctgtccttcctgtcactcagcacgaatttaggatcagattgctaagcttcattacaaaaawgtgttaacattctaagggagattgttcttattttatagttcaatataagaaaattagatgtgcttatgataatgtcttctcatccatgaacatagtacatattggtattcatgttggtgtttttatagtatgtaatattttcataagtacattaaatagcttcattatatttcttgctagcttttacagctgctatgaatgactctttaaaaaataacatttttaatsgttcattgttggattctagaagagttactgattttatgtgctgatcttgattttaggattcttgatgaactttatttttctatgtatttataatatatatgtatatataaaatacacacacgcatacacatatatatatatacacacatatacatgtgtgcaaacaagtctgtatttgttttctagtagtctttatctggttttggtaatgaggttatagtagccccataacatgatttggatagttttcctttttctgtcctctgaaattgtgttttaaaaaatatttttagtatgatgtggtagtatgtttagaatctaggaaatatttgcctataaagttattgggcttgctgtctatctaagaaatagattttcggctggcaacatatataatttatttaatcgttctttgttcattcaaatttctcattttttttgagtcacaatattagataatttatattttttaccaaaaattgtctacatcaattatattttctaactttctggcataaagtgattcatgttttttcttatggttaaaaaatatctcttctgaatctgtcatgctgtctctctttcattctcagtatttttttcaaatcrtttttatttatttttaatttatatacagttgaatttatcctttttggtctatagttctactagttctgacaaatgtaaccaccagcacaccaagtctgtttcagtgttttcccccaagttccctcatattgccttatcgttgtcaactacctttactacccccaacctctggcaagcatctttataattttgccttttccaaaatgacatacaaataggattatatagctagactcaaaagctacataccatactacctactgctataccagtgtaacgcatttgacattcatccatgttgtatttttaatattttgttctttttctattgttggatagtatccactgtatgtgtagaccacaatttgtttatccattcaccagttgaagatattcaccttgtttgtagttttttgattattacraatagagttgctatataaacatttatgtacaggatttgaygtgaacataagttttcatttgtattagttaaatacctaagcttaggattgctggattatatggtaaatgcatgtttacctttatgagaaactgctaccctgttttccatagtgtctctaccttttgcagtcccatcagcgattgttggaaagtttttgtggctctgcatcctaggcagcagttaaaatgatcaggttttacttatttttttcagttgttttaataggcacaggttagtctttttagcaggtcactgtggtttttaatttgtgtttcctctaatgattaatggtgtagaaaacctttaagtgtttatttgctctgtgtgtatcatctttgtcaaagtgccttttgaaatattttgcccactttgtattgggttgtttgttttcctgttgttgagtttttagattttaagatatagtctgaatagaagtttttcttgtcagataaatgatttgcaaatattttctcccagtctgtggcttctcatttcattttattagtagtgtctttcacagagcagtttttgatttggatcaaattcattttttttctattgttgatcatatttttgcgatgtatctaagaatttttttctaacccaaagtcataaagatttcctttttttctagaagtgttgtaatttaacatttattcctatactacgttttaatattttcataaggtgtgaggtgtggatgggtcagtagagtttgtttttgtctgcctaattgtttaatcaccattkgttgaaggcattatgtttttctcagttgacttgcctttgcacttttgtcaaaaatcagttgrccacctttgtctgtgtctatttctggagtttctttattttccatagatctatatgtctatcttgccacgagtatcacactctcttggttactgtagctttatgataagcattaaaatcaggtagtgggagtcctccaactttacttttatttttcaaaatttttttggttactctatttcctttgcctttcccaataaattttagacacaccctgtcagtatctgcaacaatttctgctaagattttgattgagattgcattgaatttgtagaccattttagggagaattgagagcaatactgaatttccaacctctggacatacatttgtcactccatttatttagaaaagaaaagaatgttttcttttatgagtgtttcatagttttcagcctacaggtcttgcatatattttgttagatttatatctatgtgtttcctgtttcagtaaatggtaaaacatattttaaatgtttttcattgctagtatatagaaatacaattgatttgttgtttattgatcttgtrtttaatgtatttaatttaacatcatgttatctgaaaataaagggatatttatttcttcttttgcaatctgtatgctttttatttccctttcttgccttgtcaaactagctgggacttccagtatgatgctgcataagagagatgaaggtagatatctttgccttgtttctcattttaggggagaagcattccatctttcactattaaatttgatgttagctgtaggtttcttttgtggatggccctaatcaggtttagaaagttctcttaaattcctaggttgctgagtattaaaaaaagtcatggtggtaaacttttgttaartgctttttctgcatctattaagataatcacatggtttttcttctttagtctgctaatacgatacattgattgcaaggttaaactaaccttgcatcctcagagtaaacctcatgtgatcgtggtgtattatctttataatattattagaatttgttaatattttggtgataattttgcatctacactcatgagaaatattgatctgtagtttttaacttctaaaaatccttgtaatgtcttcgttggattttgaaatcaaggtaatacatctcttacaaaatgagttgggaagtattcattccttttctatattctgaaataaattgaatagagttgttactgtttcttccttaagtatttgtatagcagatatgtgggtctttagaaaatccaaatagataatctctgtcttttacttgatgtttaagtcatttacgtttaacacaataattgatatgtttggatttaggtstacgttttattgttgtttgttgtcctctctacttttgtttttcttttcttttctgccttctttttttttcttaaatttcttttaaattaatctactggcacttttcttagtggttgctctggaattgttaacttttcaaaacccccaggtagttgctttttgtattttgtctagaatttttagttgtaatgggtgggagagatatgtcgtactaggcgtagtcaatgttggctgcttacatattgccttttgaaaaatgcagttttgctgttcttcatctgtttttctagagatctatctacttcgttcttttaaaatgagtgatttctggttgtattgaacatttcctttggtggtggtacttgttttcctcctctgtaaaattctgtagtagcctccctggatgcccttactaaatgcctgtgcattctatttaccagctcagtaagctcatctcccaaagcttccgtgtattttgctcttaaaaatttgcacttgcaatcttcaaaggactgctgttgggcactggagccacctgctggtatggagagctaaaggtgcctgaggcttacatgcttcccacctcagacawyctgtagccagtaactggctagatayagtatatctcaactcttttgccgtaagacagaacaaatcttctctgtatttactgtgttttcccacttccttacttgtttcttctgggagtacttccttaataaactacttacattctagtccttaactacgatcattttcttccttttccttttttgagtttaatcttcttcttgagttgtataacatttattttcactctttttatgtaaatgaatttatcaagaacwgtattgaatttattccacaacttatgttttgtagaaccctgttttcctttagcccctgatattttwatgtttcggtaatttgcacttttaacacacaagtaatttaggagtgtaatttwaaaatattctatatttttgtcttttaattgtcaatttctgagttaattgcattggggtctgagaataatatttgttgatatttgattttctgaaatttgttgagacttttgttgcaagatttgttatttgtaartattccttatcttcttgaaaataatgcacactttgtatttgttgacggattytttgtatatctattagrcyaagcttgctacgatgttgtacaagttttctatgttataagtaatttttgtctgctggagcaatttccaatacagtgagccagaatctcccactctgattatagatttatcagtttcttcttaaaattctgtcagttttgctttacacatttttgaggctatgttgctgtgaggtacataaaattcatgactgttatatctccttggtgagtcctttccttttataattacatggagttctttatctccataaatgctttttgccttaagttagattttatctgctactaatattgctatyctgctttgttgttgttgtgccagcgatattctttccattcctctatttttgaccttcctgggtcatttattttcgtgtgtctcttataagcaaaatatcactagattaagaaaaatccaatttgttagactctgtcctttaatttataacttaaacctgtttatatttattacaagtgctgacatgatctatttgaacttatttttactgcttattttatgttttctttttttgtttgttttcaacagggtctgatatatgttttctttaccattttattttcttctcttcaactcttttcctcatttacatttaattactaaagctttcatcactttcctctcctgatttagaaattacagattttacttctattttttcatgattatccatccttatttttcctaactatattttttgaagtttaagttgcattatgaaaaaccaaaccaaacaaaaaaaacccatcagtattcttactaccagaaattaatcactataattaatatcttggcataattgccttaaggaaatcattctattgcttttataaaaatgaatcatgcatatcataaagacgttaaatgaggcaaaaatgtacagtgaagaaaatcttttaaaaaaccctaaatctcaytaacttaggcaaacataattccagacacctatgtatgctgatagaaagtaacatggatacctggacaaatacttatctttataaaaaatgaccatctctagatgttatttcaaaatataaagtatttaattttacttaatagaagaaaatgtaagtgaagtgaaactgagggaactgtgaacttcaaatacatatttttttatgtaaaatttatttcccagaaaatcccttaaaaacaaaaaaragagattgtgaaacacatcaggagtttatagtcatttttwwaaaaaaaaattcatttcaagtttcgagttttctcaaaagtttcaaatttagtctattggctcctttctttgaaagwtgagatgttgrtttactcacctccccgtcattttaccatcctatctcccaagagttgttagcttttttacttttaccttgtccagcttaattaatttcacactttgttctgtcatcataattccctgagttacttaatgtttatctatatttaagtgaactctctgctcattcctccttcttctaccccaatgtctmaattcctatgtttatttttacgtatttctaatctgttaattgcttggatttaattgtgaatagttcattttattttcttgaaaaaggcttctgtgttctacatttcctgaagtatttaacatttcagaatggatgcttcttgcctttatacatgaataactttggctgggtgtaataytctttgctgccttttctttccctccaaacacagacattaatacctttttgtcgggctctgagtgttgctgtagagaagtcagtgtcttgcctgattttcccattgtgtgtgatttttctctttctgcttagatatgtaaaaatttctctcttaactttgaagtttaataacttaattggatgggctgtgtctttgtgttggaatttctgtatcaaatgttgctaaaacacattgtgctattttgtttattttgttttgtttttagcatgttcatttatttttttcaatacagggaaaatttcttgtattatatctttgaatacatattttgttctacttgttggatttttttctttaggaacaccagttattcttaagataaactgtctgtcttttttttttacagtcagtggttctcaaatgattttaatttcttttttttttttttcaaagtcataactcacaagagttaccttttatgtattccataaaaatacactttttttttttttgctatccctcccccctcccccgaccccaccacagtccccagagtgtgatattccccttcctgtgtccatgtgatactcattgttcaaatcccacctatgagtgagaatatgcgnnnnnnnnnnnnnnnnnnnnatttcttttttatatgcactcatttttattatgtcagttacatattatatcattttctctatgtcagtaattagattatcagtcatgcctattctgtttctctgtagtaatgctatttgggatttaattttgtttcccaagtttctaatctctttttccatattgttctgtagctttatcatctcatctttgaattttaattttgttgaattcatgtttctattaaatttttccctaattttaatcagttgtgggtaattttcttctgttccctgagtaatgtttttgtataggttggactccttgactgctgcgttcctatctctcttctttgtcttttgtgctcamatggcttccacgctgagacatttcatctagttcatgagtgccaactctgtctaggcatcctctttgcttcgaatattgtacctgagacctcctggtcctccctcttagctacagtgtaatggctgcatagtttctttctmttcactgtttgagatggtggaaaaggcagagtaagagtgcctctgggtggtatgcaggctttgtcagamgataccatttatgtggaggatgccctaggctttggaacatttccccattcagtaggtgtccttgggccttcattctgatacatgggaggctcagccctgttgttcactctcccagtcccctacatctcctcgaaaayattttccactccgttagggtgagaaaacaaacaaacaaaaagtaatgatgtagtattagtttgttctcatgctgttataaagacatatgcgagactgggtaatttataaagaaaaaakgtttaattggcacaaagttctgcaggctgtacaggcttctgcttctgaggaggcctcaggaaacttccaatcatggagaaaggcaaaggggaagcaggcacttattcacatggctggcaggagacagagagaaaataaagggggaagtgctacacagtttcaaacaaccagctcttctgagaactcactcactatcatgagaaaagcaagggggaaatctgcttccatgatccagtcacctccctccaggtccctcctccaacactggggattacaatttgacatgagatttgagtggggacacagagccaaagcatataaaatgccttcttagctcaggtctacagaaaaagcatctgaaatgaggtttgtgtgttacggtttgaatgtgtctcctagagttcatatgttaaaaacttaatccccagtgtaacagtatggagagrtgggatggtatgaaatgattaggtcatgagggctctgccttcatgaatagactaacgttgttatcagaggagtgagtaccttactgagaaagaatttttataaaaacaaattcagctccttcttgcactctctctcaccaatatgatgccctgtaccatgttatggcccaacacaaaggccctcaccagatgtcagtgctgtgccattggayttcacagtcactaaaatcatgagaaataagtttcagttgtttataagctacccagtttatggtattctgttatagcagcatgaaatggattaagataatgtgcaagtagtttattatggtaatgctcctagggagcgtgctagggaggtggggcagggaagggaggaagccagcaagrtgtgatctcaggcagagtcccacagagggtggcctcagcctgattccacagggagttctgcagtggaagtatgcttcagcattgtgcagattcaggtctaggagatagaggatgggtgcccaaacatggtaaaaaggagtttgggtaaaggactgcatgatccaacctttcaaatccttctacatcactccattctgttatgaatttggtaagggagtgatggcttcaaatttctgggaaaaaaatacttaaaagaagaggacaagtcagacaaactatgatcttcactacaacagttggttttgaggctgtactggatactcrgcagctccctcctcagccacccactgtagattctcttctcctggtctcagtggcttgcctagacttgacctttatctcctgtggtgtctgaacgtattctttcaggctatattggtataattgccatccataatcactgtatgtgggcaccaacagatgtctcagtggattcctatgtcccaaatttactttttcctgwtcccactctgtatcatgaaccctatctcctcctgacaatcctgccagtatgggaaatcctttcttttcctgctgacctactggtatgggagccccaaatgaccgggtgacarctgtactttcacatttagtgggacttttacaatgtctcygggtggaaacttcatcttcagggaaacaagacctctaaagttgggagggggtaaatggaaggtcactgggagtgaggtacagcagggtatgcccactgtcaccccttggttcctgaatccacacctcttctctattgaagacacatgatggcctttgagtcaagatatattctgcatctcagggactgtatcctagattttttggggttatctccaagtgaacacctcaggctggcagcttctaggtgataggatgtgttttcctttgtcataaagtgggtcttttggtgcaagttgatrccatgtgcaatccaatgaccaatcatgtacttgccccttggatagtggtcctggctgagacattatgagcaaaaaaggcaaagcgattctggaactatgttttagttcctttcaggatgaatcactttttccagggtagaagaagttgtatataattaacttgacacaacattaacttgtcttggtagtttcctggagggtgacactgtatcgaaggtttctgctgactggctgagcatttatttactgggcagattcggggtggctgatggtgctgctggacacctctgagtaagagctcccatgtacctggttgtctaatrcctcccttgaagtggctgcttgtggtgggcattgatgtgtgatcccaaaatccacacacttgacttgcatagttctagccacatgacgcttgccaaaatctccttgttctcaatctttctttcttttcttttctttctttctttttttttttttgagatggagtctcgctctgttgcccaggctggagtgcagtggcgcgaccttggctcactgcaagctccacctcccgggttcacgccattctcctgcctcagcctcccgagtagctgggactataggcamctgctaccacgcctggctaattttttgtatttttagtagagatggggtttcaccatgttggccaggatggtctcgatctcttgacctcatgatccacctgctttggtctcccaaagtgctgggattacaggcgtgagccaccgtgcccagcctgttctcaatctttcaatcttgctcttttgagagtctgtctagtcagtcagamaacagataattcacactgcttgggaatatatgtatttcgggccatttctctctccatgcaattgagagatggagagtggatgactgcctggactctcagggccacccctgagtgcagctgcagtgcagtagaagttcactttcatcttgcattgccatgcagggcagactcatcctggtttttgcctccgttgtcagctggttgtagagatcaccccctcccaccccaaagaggccatasggtgagctgagggagatgcattggcatgacataggtgggtgacatgagggtctgggccagcagtttgtattgcttgcttgtgtttttgaacctgcttgtgcttgctcctggatgtataactcccacacatgaattactgcttaatccacccaatacatgacttgttggttcaaagagcacccagcttggtacaagagctctggttgcagtcacttgatgttccatggtcaggggctcaggttttatgtggcttttatattttgggagcagatttttgcataaggtatatttgactgcagcagacaacatggctttctccaaagccacaggaatctgtactataactctcctgttggggctttccagagacctgaccctgcacctttatctaccacagatatttctagtaccataggatctgctgaatcgtatgacccaagtgtcagctctgcttgcactatattctggacctgctgcagagccttctcttaatctggaccctgcagagtttgtcttccaacctctgcaagactattgtggagaaatgtgattttctgtgaaatgtccagatgttcaaggtcaccttaggctgtactgtgacagatagaaggagagctggcatagccacaggagaagactatggatgtatattctcacccatcctgtgtgagtgaaactgcctcttatgctccttgatgaagattcaaacaagtccagtagaycaatagctgcattactacatagcagaagctgtgttgatctgttctaggtaaacacaccatatctggcaaagtagctgtgactggggttacacttggttaagtctgagtggtccatcctcatccaccatgattcatgtggattttgcaagttccagacttatgaattaagtgggaggacataagggaattccatgccaatctgtcctttaagtctttgagaataacactcatttctacctctactcccagatgtggtattagttttttttgtttttttggatgaagtcttgctcttgtcacccaggctggagtgcaatggtatgatctcagctcactgcaacttccgcctcccaagttcaagcgattctcctgcctcagcctcctgagtagctgggattataggctcctgccaccacaccctgctaattttggtacttttagtagagacgggrtttcgccatgttggccatgctggtctcgaactcctgacctcaggtcattcgcccgcctcggcctcccaaagtgttgggattacaggcgtgagcccccgcgcctggcccgtggtattagttttgattgcttgggtcagggggcaatttcaggagctggcgttcggcctttcctactatgttagctkctaggtatgtccatcctggtgatgtrttccggaatggaggaaatgcccacttggtgggtctgtggacctgcgggacccactgagagaaagactggactgcattcactgcttgcactcacataccttcaccttaatgcggggtggagggcatttgtgttttgagccttcaggtatgaatgttagctctgatgctgtatccaacagcacactgaagatataaacttcttcccttttccaaggcacaattacttgtaacaggggtaactgctgttgtttatacctcctgtggcatcgcagtgtcttttctcaagagagcctctccttcaattgatgggtcctgtgtctgagaactgactgacatgtaacttactgcccactggtacgtttaatctcctttctttgctcatttttatccattcttgatcaatacctttgtcagccacatggagtcactaagtacaccatggtcatcacacatccctgtaggtaacattcccctggttgccatcctgacctcagtgtctaccttgcctctaatgattaagtgctgctatatggcctccacagttccagaacccttttgtccttggtgattctagaaagctccactccatgacaagacttcctattatcagcatagcttagagcagatagatactactgagcttaagatgcctcctcagtctcccctctttccatctttcttccttccccagttccttcccacctcctcagtgagggaagtttcctctgaattctctcaggaaacatatgatgagaactcagatcttatgtaacagatccatggtaacatggccacttctctgggatcacaagaactgaaccccttacctgacactccagcaaggctttcttcacatcccctccacattttatttatggtaaggtatttttcttcaagagactaagaaccattcagaaattgctaggactgactcccaggaccttgaccaagtgttgaatttctcatccagcctcaaattctgtgccctttttcatacccactcttggttcagtggccttaagacccacttccaggcaagctctcttgattcctatgggttcatatcagccaggtatttttaaaaattttttaaattttaaaatttttaatgtccataggttattgggaaacaggtggtgtttgattacgttagttaagctgtttagtggtgatttgtgagattttggtgcactcatcacccgagsagtatacactgcacccaatttgtagtcttttatctctcacctcttcccaccctttccccttgagtccccaaagtccattgtgtcattcttaatgccttggcatcctcatagtttagcttccacttatgagtgagaacatacgatgtttggttttccattcctgaggtacttcacttagaataatagtctccaatctcattcaggttgctgcgaatgccattaattcattccttcttatggctgagtagtattccattgtatagctataccacagtttctttatccatgatgggcatttgggctggtcccacaattttgcaattgcaaattgtgctgctataaacatgcatgtgcaagttatctttttcacataatgacttcttttcctctgggtatattcccagtagtggaattgctggataaaatggtggttctactttagtcctttaaggaatctccatactgttttccatagtggttgtactagtttacattcccaccatagtggttgtactagtttatagtagtgtagaagtgttccctgttcaccacgtccatgccaacatctattttttgatgtgttgattactggccagacatttttgttcaatygcccttcttttactttaggagggccagtatttcctagttagaccttactgagactccaccctggttattgttcttgtggccagtgggggtgagggtagagtrtggtgaaggaagatcttgaggaggaaagacagtcttacaagagattgtcaccactgaggcctctgagtagatttcaagcaagggcatttgctgtctccygcaaaggaatagcccaccacttctgcaggtagagagagttccagggaatctggaggtttagtgttttcaactctccacccagatgtctctaccccatttcagggtcccaattctgtcctgtcaagaccttaattttggcatatgggaccccacttctctctgaagcgttgctctctttcactcagattctaggttccatcttctggatggtctgctatctgaccatgggaaggatgatttatttaagcattgtcatggaggccttttgcctatcatccatgccttaaattggtaattgactgacttgagtctgtaattttaatcttcaatgtatcaataacatttagcagcacccaacgaattccacagatatcagactttctacttctttgatatcgctcagatcctagatgtggcaatcatctagtgcatcccctttcacccgctcacagtccgtcatactttttcccagctacctttcccatgttcaggggacagcttcagccggtgggctcacacagtggctttcagttatgcccttgcctcccagaggttactcgtagtcccaccactcctcacaataggaacttcagggattcagccactggagttctgccactttttgttttcaaatcatatcttattcttgcagtgtttrtttttgaagatggctatgtattttacaacttcttgaattacattttgcttttcatactggcatgagtttgaagcagggatgcctccaaacagaaacatayaacccaatcctgagtgggtcagtctttttctatatctacatttaaaagtagccaatgcttctaaggtacctaaatctcaattgtgcattttggtatgtggctttgtcattattattgagtggttgtttattataattttttgagagcctatatgccagtcactgtgctaagcactttacaaggatcatttcacttaatctttactatatataatcttcactttattttatagatgaaaaaacagaggcttagaaggtaagctagaaaattacagtgaatgaaagagcaagattagacctcagattttgtgwctccatatctgatgttctttattccacttagctgtctctccattcactcacatactcactcactcactcattcacttactcattcacttgaatattgggcgtccattctcaatcaagtcagttacatcagttctcagtctctatctatgcccgcttgttttcaagtgtgttggtgctgatttgctgcctcgatagtggagtccttgaatttatgagaatgcctgggtggagcccgcatccttgtaattggcagaggggtcaggacatgtgttttgccccatggacagttgtgcaagttaatgtaatgttctctctcaagcytggagcatgctttggtggaattcagtgcagtgtttgcatggaatcataacaaggtctgtatttgattttcagccaatattgactgaagtcccacagagcrctctcagacctgaattagggggggcctatgtaactaatatacataatttttccaacgagactcatgaaggttttcctggaactgctgctgatggaatgcctggcacagtggtgggacttctcacccacaggagaggagaccattttctgcaaagtgaaacacttgccaagcaccctgactcactgcctgggggcgctggggcaggctggaagcacccycattttacagaataaacccaggtctgcagtaatgggagctttcctcaaagtcatagagctgggccctgcaggctaagtccttgcctccacacctctgatctcttggcggctctcctgacggtcccatgtagacagattgattatggtagactctcaactgggggacccagmctgtgttcatggagggaaggcagtgctgggccttattttagggttggccagagtaatgcttgtgccacaactagaaatccaaaacctgcagtcctgtgttgagagagagattgggaggaaggctgttggggtccagtgtgtggcctggatggccttggaggagaactggaaacacaatttcgtctttggtttttagagatagagtcttgctctgttgcccaggctagagtgcagtggggcaatcatagctcaatgcagcctccaattccygggctcaagtgagccctcacacctcagcctccccagtagctggaactacaggcatgtgccaccgagcctggtcaattttaaataattttttgtagagatggggtctcgccgtgttgctcaggctggtcttgggctcctggtctcaagtgatcctcctgccttggcctcctgaagtgctgggattataggcatgagccactgcacccggcaccatgtttggcttttaaatagagtgtggggctaaggcaaatattgaagttaacagaagtgtgttctttataatcaagtgaagagagaaragaagattcttcagttgaatggagactttccctttaggcaggtagagagatgacacttttgctcatgtccagatactgaaacctcaagatgtcaggaaagccayggggacacggagatcccagatccgctcaagatctgggtcggggcctctttgagcttgtgtaaagatggctttgctgagggatgttctggcccagccccacgcggcaggcttgaatgagcccctgacctgagctccagggcctctggacaagggggcacatggcagagggtggcacaggcaggacactgggccaaataaattgtaaaagtagacagacctgggtgtaaactgccttctgctacttactagttctgcaactttgagcaaattccttaacctttctgagactcaatttcctccactgtaaaatagaggaagtggtarcaacagtctcacagtgtaaatggaaggattaactagaataataaaggcaaaattctcagtctcatgcccgacacagacaaagtgcacagtaaaggccagtggttggtgtcattacttccactgtgcttaccgtggggttttcagatcacagcgtgatgatcacaccttccctcttgtttgcccaaaaggggacattgtctctctgtggatcctgccatcttcttgctgaggatatctggggagaaacttgctcttcacactgtacctgggggagtccctgttgctttggccaattttcctcccactgtcattggagcaaagctttctgaataagtacttactcctcaggtgtgcggactgctggtattatttgtggataccatttcttctcattagttggcaacacgagatgtttaaaggaagcatgtgctgggaagtgttggcaaatctttaaccaatggctctgttcatatgccctgcaatgccttctgcctatgaacgcacatagtagtgactgtattagtccatttggcattgctataaaggaatccctgaggctgggcaatttatttttaaaaagaggattatttggcgtatggttctgcaggcaccagcatcttcttctggagargcctcaggaagtttctaatcttggtggaaagtggaggggkagcaggcacatcatgtgacgagagagggagaaggaggtgccagtctcctttaaactcctgaactaatagagcgagaagtcactcatgaccacgaggagggcaccaagccattcatgagggatctgccccaataatycaaatgcctcctaccaggcctcacctccaacattggaggtcacatttattttaacatgagatttggagaggacaatatccaaactatactaaagaccaaggcattttatccaaactatatcaataaccaaccacacaggaaacagacacgatatgagttaagggttcttgggacaagcaaatttacataagggtcatatgtgggtaaacccgaaaaccatggggctttggaagttgagaggcagggtgaccgaagaaattgccagcagctggtcagcgcggctgttgtctcctggcgatgggaaccacgcctcacgggccagcttacctgggtcttgactctgatatcaagagacaatacatcttagcatgaatccctggtgctaagtcagataatgagccatcccttgatcaaatagaagattctaggtcacctctggtttcctatactaaggctccttcaagaagatgactggggttttggtaacgaccatatgtccaggattgggctgtagcacacttgtgtactgcagccatggtttgctgtgtcagggagcttccttagctgcccaggttggccagaaccttgaaaactcaggtccaatagcaatccagtgtccacaggggaagcccacttcccagtgacatcacaattagtacagaaggcttgatcccacggctgtcttcatttggctgttgctctgaaagaatcctgcagtattccaggaggtggtcaacaccagcattgtccctgacagaaccatttgaatcccaggacaggatctggccatatcccatcttcggtcatctaacattgggagattctgaaatgccagccaggggacgatggaacccaagagaacagagcatgccagctggggagcatctgctattgttccaagtctaacactcagtcactgcttcagctgaggctgggaaaggcagccagagggttagaaggggagagggrgagagagagagagagagagagagagagagagagagrgrgrgagagagagagagagagagagagagagagagagagagagmgagagmgagcgcatgtgagtgagatcccaggagcygtgggaaaaatgcttctcagaaagcctgtctctgggtccttgtgcacagtgagggactggggcagggagctttgctcrtcttccctcctgggccaagcctggaggcttggttcctccttcccaaggctacctgctccagagacaggtccattctttcaagcctgaagcaggaggcgccatcaacagggatggagcctcagactcagggatgcactaggctgttatttttaggtgtccacagtagagattcagaaaatgtgttcagtgaagccagaacaggctgtgtagggaccagaaaacagagaaacttctcatcatggctgtggactgttagttcatggggctgttgagaagaggagaagaggcatcccttgggcaggtgaaacactgccacttcacaccccactgacccctactatcaactacaggagggattctgtgttttgctaaaggaattcttcagttctggtcacaacatttattgaaaacagtagtgctccgtaatgcttgttgagtggaaactgaatgaatacatgcgtgaatgcatgaatccaggacagctgggctcttgtcgttagttaatccattcattccacgcacatcgattgaatgctactgtgacaagcaagcgcccctgccaggagagcccagtctctgtgctgtggacagggtgggctgtgattctctgacatggccccaggccctgggcagccgcctcttggggttggccaattaattaaggagctctctgaaatctaaaggacatacatgcatttgctcttctgacacmtccttggggtggtagctgttttattatattggataaactcgctggctgaaatggctgccagcaggcagcaggagccacccgtgaaacagaacaagtatatgggaggacagagccactgcctggggagggacaggacagaaacggctgtctgggagcaggatggcctgacagctgggagctctggagtgggaggagtggagccatcatctgctcttggtactttaatgataagccatggggagcaggctagagcaggagcccagaggtgaggttgctggggcttgttgctctgtaccattcaggcctcctagacattcacacagaactgcaagatggatgcaaggagcttggttggaggcctcctgcaaggaaaagctgaaccctcaggccaggagcagtggctcacacctctaatcccagcactttgggaggctgaggcaggcagatcatccgacgttgggagtttgagaccagcctggccaacactggtgaaaccctgtctctactaagaatacaaaaattagccaggcatggtggcacatgcctgtaatcacctagtcgggaggcggaggcaggagaatcacgtgaatctgggaggtagaggttgcagtgagtcaagatcacaccmctgtactccagcctgggctacagagcaagaytccctctcaaaamcaaaacaaamcaaaacmcaacmcaacaamccagcctggccaacatggtgaaaccctgtctccactaaaaatacaaaaattagccggatgtggtagcccatgcctgtactcccagctacttgggaggttggggtgggagaattgcctgaactcaggaggcagaggttgcagtgagccaaaatcctgccattgcactccagcctgggtgacagagtgagaccctgtctcaaacaaaacaaaacaacaaacaaacagaaccagaaacaaaaaaaaamcgagcccttatcaagacaacagatggccatttaaaactgaagggcacctgagaccttattccacttgttgtctggtaaataaaattgcccaccatttattgagcaccgactgtatgcacctcacatgcattgtcccgtttacttcctccagtgaccctgcaaggtagaccctgttactatcctcatgttaaaggtgaggagactgaggcataagaaggttggcgagtggcagagctggaagcctctaacccacatctgctgactcaggaactctgcacagaacctggacatttgctgtctctaggagcctcttctcagcttccacctccttcccaaagagtggagagaagtagggatgggagagaaccaacacagcactccagaacactgggaagtcaagtcatttgctgtagaacctttagaaccccatgtccataatcccagtacttctggaggctgaggtacgaggatcccttgaggccaggagttcaaggctagtcttggaaacataaggaggccctgtctctgcaaaaaatagaaaaataaaataaaattagctgggcatggtggctgtagtcctagctactcaggaggctgaggcaggaggatcacttgagcccaggagttagaggctgcagggacctatgactatacccctgcacrccagccttggcaacagaatgagaccctgtctctaaaaagaacaaagaacaaaaccaaaaccattcgtgtagacaggcattgtcaagacccccttgattcacctcccacacatctgcaggcttgttcataatgggacttcaccctgtgcctcgccttcccactctgcactcagcagggtcctcagagcaaaatgtgagcagagcagcacacttcttcacccatggaagtttggggacgagcccagaaacacctggtaggtgatttgcccagtcggtgctgactgaatggaatacattgcaggtcacatcttgggaaacataaagattcccttaaacaggaaacagacagcaccagccatagaagaaaagatccattaacttccttaaaactagcagcttctgttcttcaaaggacaccataaacagagggaaaagcatggacataaagatgacaaaagtagacactaggaactactaggggcaggagagggtgggaggcaagggctgaaaaactactcatcgggaatcttgttcaccacctgggtgatgcaatcaaccatcccctaaacctcagcatcgcataatatacccaagtgaaaagcctgtactggtaccccttgcatctaaaatgaaaattgaaattaaagaaagaaagagagagagagagagagacagggagggagggagggaggggggagggtgggaaggaaggaaggaagaaagagggaaggaaggaggaaaacagagagaaatagcaagccgtagactgggagatgttcaaaatacatatacttgataaagaagttggtatctgcaatatataaagaatgcctataaatcaaagaaaggataggggactctataagaaaatgggcagacgacttgaacaggcacttcacaaaagaaaatgaagaaatggtcaaccactagttaaaaaaaagttccacatcattaatcaccagggaaaggcaaaataaggccacagtaaaatattgcctatcagaacagctaaaataaaagacgaacaataccaagtattggtggggacacgaagcacctgggacattccaagtggaaatgagaagtggcacaaccattttggaaaactgtttggcgtttcctcccaaagctraacacatatacaccttatgcctcattgacggcactcccaggtatatacccagggaataatggctatgtgtaccgaagacagaaacaagagttcacagcagctttattcataatacccccaataggaaaaccatctagtgcatattagcaggctaaaccaattgggtacaaccatgcaatgaaatatgacttagcaaataaaacagaaaagaaaacctactgataagtgcatctgcacagagaatctcaaaaacattttgctggggaaaaaagcaccatttaaatgcagttcaaaattaggtaaaattaatcagtggtgatagaagttagaatagtggtcagcttggcagtgacaggagagtgacttgggtcagcgatgggagagaggcccgatggaaacttctgggtgctggaaatacactatgtcttgatctgggtgatggttacacagtggattcttgggctaaaattagttcagccagacactggagatacttgattgcaggtatgttatatctaraaaaaataacaaacaatacaatttgagtcacagctgtggtcctgtggcctctccccactgcacccctgaggatgcccgcaactcccccgcactctgagcccctggagccctcttctgagagcccgtgggcgttccagagagcccattccccactccccaggagggacctctgggagcctctcactgcagcctctgattcagtctggcaatgtggcattctggcaatgtggcccacggcacccagtcctgcagggatgagaggactctgtcctaaacccctggcctgggtactccagaaaactggaagcttcctgcacagaggccactctcaggctgggcgaggttggcccagtctgcctgcctcccaggtcctcactgtggcattgactcctcctctccttcatatcaggtgcgtccaggtccttgggccactgcatgtcccttgggggtcaccatctattccctcccactgggcaggggctatgatgacagcacttggccagctcccagagcctttcaggttcgtgggtcattcacttccaggcagcagtggggctgctcgctcaggagccagggctcatcccaatgtggcacccagagaggtgaacagctgtgttcaagtttgcacagcagcttagcggcagagataggatgagggcatggtccccagtcctcaatctgtggggcaaggaatcccatctcctccaggagtgtggcctctaggtcccctccagaggcgggagggaaggcagggggcctccagcagctggttgcccacaggctttccacgcggtcatcacgcagggacgtactgcaggcctaagctgctgctcagtgagaactgtctgtggagtctggatcagcctccctgcagagcaacagtgcccaccagggagctttcggaaggagggggtggaggaggcagatccagagacaatctaattttctccttcttgggaaatgttaccattctggcctgaaatgggttctggctctgcagagccctggcagccactgacagaaacgaggttggtgtgggacggggggtgggcaccgtgcttccccagggggtgccctgcaccaggccctgagactcttccctccccgggctggttcactctcagccacgagttactggggcacttggtgggataggtaacctcaccataggtaaatgtgatttcaggataacctcgggtggccggaattcttgcccccatttcacagatgggagaactgaagtcaggagaggactgtggacacctccaaagcctccaccacccaccccatgaggtttctgcttaggatcggcagttatttccctttaaggctgatggggagggagctatggcttccttctcataatgccagagtagaggcggggaggcctggcagtcctgctcatttatctgctgcccgacaggtcctgggatcttgccttctcttacagttctgagatgggggccaagcactgagatgggggatgtctccagaagtccatgtgcagcatttggttggaaaatagagctggctccttccttctctgcatgagggttggggggaggctatgagtggctctgcctgctgatgcagaaaggcgaacctgggcacagttggcctgagggtgcccaaggtgacccctggtacgagctgagcccacagccccagcccagtgggcacagaggctgagtgacttgctgcaatcatcgtgggtggggaaggctgggactcaaacccaagacttccgttcctcatcaaggacacagcaccccaggctctgtaggggacctgtctctcatgagctctatccttccctcactccctgcaaacaattctgtaatggaatgcaggtctaaccccttatgcttgcagagcccacttgacaagggtggggtctgttagtaagcaagtgacttttattaaccaaaaccagcaaaggggaagtggctggattcccatccaaagcccgccacttcaaatttctggggagaaggcaaggatttgtacagggaaacctgacatgggaggcatgcaggggctgacctgggtgcaaggtctgtgtgtcttgttttggtggctatcttggtgtaattggtgggttcttggtctcactgacttcaagaacaaagccatggaccctcgtggtgagtgttacagttcttaaagacagtgcgtccagagtttgttccttctgaygtttggacggkttcacaatttctttcttctggtgggttagtggtctggctggcttcaagagtagaactgcagacttttgaagtgagtgttccagctcataaaagcagtggaaacccaaagactgagcagcagcaagatttactgcaaagagccaaagaacaaagctttcacagtgtgggaaaagactggagtgagcaggttaccgctgctgyctcgggcagcctgcttttattcccttatctgaccccacccacatcctgctgattggtccattttacagagagctgattggtccattttacagagagctgattggtccattttgacagrgtgctgattggtgyatttacaatccctgagctagacacagagtgctgattggtgcatttacagtcctctagctagacaaaagttctccaagtccccactagattagctagacacagagcacygattgrtgcatttacaaaccttsagctagacacagggtgctgattgrtgcatttacaaaccttcagctagacacagagtgctgattggtgcatttacaatcctctagttagacataaaagttctccaagtccccaccggattagctagatacagagtgctgattggagcatccacaaaaccccagctagacacagagtgccagagtgctgattggtgcatatacaatcctccggctagacataaaagttctccaagtccccacyggactcaggagcccagctagctttgcctagtggatcctgcgctggggccgagygagggtggagctgcctgccagtcttgtgcagagtacctgcactcctcagcccttgggtggtagatgggactggtgccacggagcaggggtcagtgtctgtcagggaggctccagtcacgcggcagcccaccgcacggggctcgggcatggtgggctgcaggtcccaagccctgccccctggggaggcggctgaagccyggcaagaatttgagyktggygccggcaggccaacagtgctgggggatccggggccccctctgcagctgctggcccgggtgctaagcacttcactgcccagggcgggtggcgctggccggccgctcagagtgcgggcccaccaggcccaagcccacctggaactcacgctggcccccgagagccgcgcagccccagttcccgcacttcccacctgcgcctctccctcctcacctcccggaaagctaactggctcyggcctcaaccagcccagagaggggctcccacagtgcagcggcaggctgaagggctcctcaagcatggccagagcagacacgaggctgaggaggtgctgagagcaagcgagggccaccagcacrttgtcacctctcattgggtctctgtctacctggagcatgggctggcatcatctaaacaatggctggtgttgactagtcaccttgagctaaccactgggatgctgcagctgggtctacaggcttggtacacctgtctccagattagcccggggaactcccaagtaagcaccaaactagatactagcatgcagtttggtaaatgtgatgtgaatctacagtgggaaagggaccaacctggagtctattttgaggttaagggaaaaggcctctgcagtttgttycaaggttatatctcaagactaaagagaaagggaaataaaattttgcattttgaagttaagctggtccatgataattctgggtctgtcaccgctaaggcagtgggcatctattgtttctgttcctttctcctttgatgcttcccctccctccctctctcccttcctctctctcccctcccctccctctctccctcaccccctttctccctcccatcacccccctcccctcttttcctctcctccccctctccctcccattatcccctctccttctctctccctccatctctctctctccccctctttctctcttcctctctctccctctctctctctccttccctctctccccttcctccatccctgcctccctctctcccccctccctccctctctccctccctctctccccctctccttcccactctctctccctctccctgtttctcccctccctctctctctccctccctccctctctcctgtccatgcctccctctctctctcctgcctccctccatctctcccctccctccttccccttctccttccctccctgtctccctctctctctcccttcttctctctctccctacatctttctccctttcttctttcctctctgtctttctcccttcacctctccctccctctccctccctctctctccttcccttcccttctccctccctttatcgccctccctctctccttccctcttttctttccttccctccctctctctctctctcccccatccctcctctctcttccccctccctccctctgtctctccctccccctctccctccccttctcccctccttctctccctctcttcccctccctttctctcccaccctccctctctccctctcccctcccatccctccctgtctctctccctccccctccctctctcattctccctccttccctctccctgtctgtcccgctctccctccctctccctccctctctccctctctgtctctctccctccctctctctctctccctctctgtctctctccctcygtctctctctctccctcccccccatccccctctctccttccctccctctctctcagctgctgtggtttggaggggcctggactcttccacctccctgtgggcaggtccccaggcctagccaatcagagcgttcatccttctggccctgtgactggcccagaggtggcccaatacaggcaacagcaccacctgagatgggatgaggcacgtggactttagtgtcccaggatctggaggatggggaggaaggcccaagggaagcagtgtctctgggtgtggaggagaccaccatcacagcccgggcagagactgagaccacctggttgtaaagcctgtgtgggtgtttgccagtctctgaccaccacagtcacttacttataccagatsgtttctgccacactctcagcctactacttcttgggatccatttgttggggtgagggggaatgacagcatatgacaataggtagtcccagaacttctccagcagctctagacctgagccacaagccccatcacctacaaaggggcttccaaggggtccttcctgcctgtctcttctcattccaattagtcgcaggaccctgggtacacktggagagaacagatgcttttctcctgtatagagcctgtgttgtgatgagaaatggagcatgagcaagatccagcatacctggagataacaacccctgtcttcgggtagaccaggaaggacagactcagggtcatgtgagaraataatggtgacaggggagggactagtttagacagggaagccagggcaggcctttctcagaaggtgacatttgagctgaggtctcatcccttggaaaagctggagagtttcaatcagatggaacagcacatgcaaaggtcctggggcggaattgaacttggagattttgtggcacagaaagaccaatatggcatggctgggtcatctaattaaaggggtgagggagaggtgaggtggggaggtgtcgggagcaggttgcaccaggccttgtaggtgcatggcagggagagtaaatggtcttctcattacagtagaaatccacaggtgggttttaagcagtggagtgacatgacttgatgtaaaaggctgctgtgtgcagaatgtgttggaaggggtacctggtgcctggactggtgcagtagactgtcctggttgcagtggtcctggggtggaggacatgagtgacatggagcctgagataacagcagtgcctatcttcagagaaaagatgtaaacagatgattatcttccttcttagcagcggtccggtctccttcccttctccattcccattcatctgtcgtgcctcccgagtcatccccactccacctctttacactcattgagaactttctccggaccaggccctgggctggttgctggggcccagaccctacactagtcagagccagcgggaggcccctctgagtgtgagcatcaggatcacgcgctacctcaggccctccatctctccagccccactctcccactagttgcataacacgttgtcggagggagacactattgaaatcacaatggtgaagccgcagtaatagcctcctcggctcaatttgggtagcagctttatgtggtagtttaattcattgtacaccaatttcagttgtgcattaattacaggcggctgaatagtaattaactaatcaccatgtcacttcttccctgttaggaacaacctcattaattccagtctgccgggctgctggtgtcttttgccatmccccctcctccaccccctgcgctctctccccctctctttttggccgctcttgacttataatcaaatatgaaagtcatgcattttttaataacttctcagctgtttttaccactgaaaaattcatggcattacacagcccctttcaataatgtttactyattttacatttctcgtctacatgtttggtgctgtctgcccttaccgacaagctgttggcrctgtcttggagagtgttggggccagtctggggccatcttgggcaatgaaagaggctcttcccaggatgcatctgtgatttcctggyggtcacataggttgggtagmtggcatttctccckgggcgtttcactgaggccggtgagtgccctgtggtctgttttccacgtttgccgtatcccatctccatgtttttgcgtgtgtcgtgactgyctctcgttgtgctatcttcttctcgtttctgcttgacaatgagtaggcatctaggcccaggtgagaagccctgttttcaggaggcccccctagtactgttgttcaagctcttctcttaccccacattgtgcgctgtgcatggtttccattcagacccacaaaccagcgtttcaatccagtgctcatttctaccaccccagccctactggggcctgccagggtgcagaatgaatggagcatccacaggcattgctttattttgttctcaggaccctgctgcaagggagcccagcaaggttcttcatcaattttagagatgagaactcagagggcagaaaggtttgcccaaagtcaccacaagtcagtggacaaaggacaggagcctaggtaccctgatggccagataacgagaagatccccagcgtccctggatgyctgctcctcctgagacatgacccccttgccaaggtcaggggcagttcctcttgttcccagccagtccgtcagctctgtcagctttgatccaaaacactcctgagtcctaatacatccacttctcactcccggctccctgccaggcagtcgtttgctgcttctctgtgcagctttttggttagttggctccaggtcttcatttagtctcagcttaaatgccgcttcctctgagaggacctcttgtccctgagggacaagagcagggccaccagtgaacaccccagtgaaggggttccccagtcactccgttccacatcacccaggttcgttcttcatgacctttgactgggggctgacatcgcttccctcatttgcttagttagttgtctgatttctccactagaacattagctgtggcagggaggagcctcatcttccttcttgactgttgtactccaggagctgtgagagcctctgtgccccagacaccctccaatggcttacagctgcatgaagaccaaattcctagtgggatccacaggtacacgtggtccagccttgctgagggctctagagccatttcttaccatattaaagtggggccttctagggcagcactaatcagtagaaatatacagccgatggcatgtgggattttaccttttctagtagctgtgttagaaagaaacaggtgaaattttccttaacccaatatagcaaaaaatgttattttactgtataatcagcacaaaattcttcttcttattttaaaagacaggatcttgctctgttgccaggctggagtgctgtggcacaatcatggctcactgtagcctcgaacacctgggctcaagggatcctcccacatcagcttcctragtagctaagactacaggtgtgccctgccacatctggatcatttttaaacttttttcagtggtggagtcttgccgtgttgcccaggtggggcaaacttctggcctcaagaaacccccctgccttggcctcctaaagcattgggactgcaggcatgaacactgtgcctggctacaaagcattaattaattaattaattaattttttttttgagacagagtctcactctgtctcccaggctggagtacagtggtgagatcttggctcactgcaamctccacctgccgggttcaagcgattcttgtgcctcagcctcccgagtagctgggattacaggcacgcaccaccataccgggctaatttttgtatttttagtagagatagggtttcactatgttggcaaggctggtcttgaactcttgaccttggctgagtcrcccacctctgcctcccaagtgctgggactacaggtgtgagccaccgtgcccggcttgcaaaacatttatgaatgagatagttcacattctttgttctgtcttcagcctttgaagtctgatggacgttctacataaacagcaagccttaatttgtattggccacgtttcaactgctcactcatcacatgtgacttatggctccctattggacaggatgaaaaggagtgacgaggactcaccagggggcgagggaagggaagggcattctacacayagggctcagcacaatcacaggtgtgaaggtgaggagcagcacagcacatgacagggagcctggtatggcagaggaygggcttagggcaggggctgggctagtgatgaagccagaaaagcagcccgggcatggggaaagggcttggaccgacagcatccaaaggtctcctctcacactgcaatgtggtgggttggtgtggtgctggaagctcattagggtgaaaatgggagtttggtgctaattagagactctaggtcacttctttaaggacccctatgggcagtgcttctaacgtggctcagatgggggtgagtgcgtggctggatcagtgcccctcctccaggacaattacatcacccagcactgagcatggcttggggttgggtggtacaagggctgagctgcaaggacaagagcaggtccacactsagggcagtggccctgaccctggagaaggagaaagaggctgctttgaggaggctggacagggagctggcccttgtgagcccctcctgtgggcctgacacttgccagtggtacctcgatttctagcgaggtcaggaagtagatactctgaccattttacagatggggtgactgagattcatggggagagggcttgcccaaggtcatgtagctgaaagggagaattcacactcaggtttgcctggcttcaaagccaaccaggatccttgacaccctaaacaacgtgactgctgggagtggcatgggccagaccgtaagacctccttccttactctggggtctcccaaactggggagagggagaaggagcccctgctgctggaactgggaattctgcaggccagaaagcaagcatggcagagccctgcgattggggtggtggaggcagagggccgtcagcccgggttcaggaaggactggctctgggtgggtctgtgccctgcagagagtgctgagcccccgctatgcccagaaggattttgagaaactggctgaggtgtggctaaatggtctgcaggacttggagcagcccttgcagatgggtcggggggcacatrtgccaccagctctgggtctgaatcgtgtgccgatggagagggcctagagtgggcagacgctgtgcagttcatgatatgctgcaggccccaggtgtttgagcctgacctcagctccccttgtctgggccttgtagaggtatctggctgcccccagggcagagaggtttcttttctctttggagagaggratgggggcatgacaagcctcctggatcaactgatttgcagcacacagcaggaagcagggctcagagtcacctgtgccttttaacgtcctggaatgataggaggggcatgggaagggagctgccctccatggattctggggcagggactgtgcctggctgggagctggctgtgcctggtggtaaggctgtcaaygcttcagtccctaccgtggcacctggggctggggatgtgggtgaggtgggtgaggctgcacggtgcaacccattgttcttgctcagcaaaggcgcccaccatgttcttctctgcacccagctctgtgagaggggagtgacatgcaagctgtcccatggagtgcccaggtcagagggggatgtaggggggtgggtgggaaacagaggcagagaggactggaaggaggtgccactgccctggagagggcatcacgggagctttgtggaggcggyactgagctggcctgggtggggtgactggtggcctaggtttggctgggcaggtagagtcttccttggggtcactgggctggagctggttggggtccaccttagcagaggccctcaggctaggccaggacaggctgggcttgagcttactgtcaccttcatttggctcctagggagaggttgggagaagaaaagagggataatcagatgggagatttggaaaagcagagaaagacgatttagcaatttaggagacagacacacatgcacgcgtgcaygcatgtgygtgtgcacacacacagacagagagacagaaagagagagagagggagagaggtgtgaggggagagagggggcgcccctgtctggatccacatcgtgatgtggctgcctccaagcccctaggccccactcactgctgggaaagtcctcccgcagacccaactctgtctcacccgtcccagagcccagcttgatttttcatcaaggacacgtgaggaagtggagaggaagtggaagaacactgcccgagaattctgtctctcctactgctgcttgcacctcacgcccttgagcaaaacttacccgtccctgaatgtgggttttctcctctataccacagacccatgatgaggataaaattaaatactagatacaaaagagttgttcaaatggcaaagtatcttgtacgcatgagtgacggaagcaggctggtgaacatggctgtgggctggtaaattctctgcttatttgcagggctgagtgattatcttcacttgggttccaaagggaccaaactcagcctcttccatctgattcagaagaggtaaagcagcatctagccttgagctgcaaatgtgggagcctcaatgagatattcaaacatcgctgagcagattttcacagggtatgttgcctcgagggggaaagtctctatgtttagtcctcttcttgctaggacatggacttttaaaatgtgtactcatcaagacaaaacaccatggtgacatacagtcagtttagtgtgtccctggggagtgttggggcgacggttacaggctgtttatggtgacaccactagacaggtagacatatattaccggcacttaatttgcgagaaatgtacctactgtaagaggatgtaaaaccagcaggatcctggaagaatgattacgtgaggatgacrtcttatcagagatgagatgagctattagacaactgtgctgcacatcaaaaagcaaaaagaaagacaaacatctcttaaaatgaattttgtaatagtggaaatagaaaacaatgaagattctgctgcaatttttgtaataaggtgtctcatccagctaatggcaggagatgtttaccactgaccatcactgacatgaaaatgcattcagggttatgaggaccccacactcagccacagaagtctcttcattattgtcacactgtatactggaaagtctgaagacctattcagcacaatgacaacacgaggctttgctgtgtctagcctggagtggcttaacaagctgcactggactttgctggcttagcttggttgtacttcatgttagatttgggggtgggtggtggcaggtgtgtgtgaggaacctaggtggggctgtttggcagagtgtctggaatgggacctgtggcctggctgctcctagggaatgggcactggccttgctggtttagcattttccgacatgaggatccttgacccacacttctgagactttctgagcaaagtctgggaaacgccgcatgtgatggctctttctggcaagtcatagcaatatcatgcaatgaagaccctgagaggccctgccatagacacctgttcaacttgattcaatccaccctgtcccactttttcttaatgggagaatcacaccatccccttttgcccaacccagccctgtatrggaactgtattcagccattcttgtgttgtcttgtgttgctataaaggaacacctgagactgggcagtttataaagaaaagaggtttatttggctcgcagttccgcaggctggacgagaaggatggtgccagcatctgacttctggtgaggcctcaggaagcttttactcatggcgggaggtggagggggagcaggagtctctcatggtgagagagggagccagagagagcaaggggagatgccacacgctttaaacaaccagatctcatgtgaactcagagcgacagctcactcatcactgaggggttggcccaagccattcataagagatctgccccatgacccaagcgcctcccaccaggcctcacctgcaacactggaggccacatttcaacatgagatttggaggggacacacactcacaccatatcaggacataccagtttgtcaaactaggagctccgaggcatacgttttgggaaaggcttccccagggctcctggcatctgggagggtcaagttatataaacaatggcatctctgagaccctgcgggttctgtcctatatcagatgatgtgggaccmttggagaaagatgccaccatcatccctcagggagctcactctccatctccgtgggctccctcattccagcctgggatacagaaacactgagccggaagttggggtgtagcaagccccctaccatggatctctaagcctggatggaagcttgggtggggcgaggaagccacccagcctcctgaggcagagccagttgtgctgtgggatagtggggtggacttcccgtggctctgcccctcagccccagcaccaagtaacccctgayggcgggcggcgggggacaggcattcactcccagctcactcacttctggtgccctgaaccactgacttagtgcagcctctgctagaattccacccgaatgccctccaagacggtgcttcgctgacccgtgtggaccctctcatggcgggccgctgtcgacatctgctcagcctgctggccatagaattctctcttctgggaacaggccctgacctttccccgggaactcccctcctccactcatctgtgtgtttcgggtgggtctgaccccatcccttggtccagggcaggcatggggcccaggtctggcctatccatgctctacctctctggacatggcatttggcctrgggatggcatgtgacccaagatgggccagtgagaggggctgtcttctgctgaagctgccctccaccscaggatgaaactttcggtgcagggagttggcttgggagctgattccaggaagcatagggagaggagacgagaagtgagacagagaagggaaagaagccgataagcaggttactgccgtgggccattgacaccactgaggccactgaggctcagcycctgggcagcccgggagatggggtggcacacactggggagtgtttccacctgcagggccaggaagctgtgtgttgtcctccagctcccrctcatcacgtgctgagggctgctcctggagatgtgcactccagcgccccattgctgtgttgtgctcaggcckctgacctagtgtgtccctgtgaccagagactgccctttggtggagatgcaggtgctgmtgttggctggatggggaatgccaagggagggagtgagcgcagcccagcagtgtcggaggtggcactgacctcccaccttcccctctcctactgctctgcccaccctcagccygatamctgtcattcctgcacctgctacccctgcgccacsttgcccgtccttccctcccatgatgctaatactgtgtcccctttctgtactttcaggctgttttctggattcttcctccttttccaccaagttaagtgctggtattttttgcaggaaagtgaccactgttcctggaggatttgcattgctggagaagtgcattctaacagtggaattcaggcggngagagtcgggtagggggttttccctgttcctggtgggttatggtcttcagggcagctgcagtgatgattcwggcccctggaacagggaaataagggggctctcttttttgttcttttgagaggggtggggtagtgcatarctgaagagtaattggagataatgtaactgtttacacagtaagtgatgttgtttcattttgtgctacattttgccctaaykctagaaaacatcgtgctgaaaaaacagacattacaatctccctcacatcttaggtttttgctaaagattaaaaatgttacttctctaatctgtttctgaaattgctttggaaatgccatcatcaagaccaaaatgcaccaggcagtcgttagaaaagcaaataatactcgctcctcatttgcctaaaactgtcaaacgatcrtgcaatctgtgaatagcaytctrtctatcccctgagtcctgtgtgcatttgggaaattaattatgactctcttataagcacataaaagtgatgcacatggccatcagtttgttccatttctacaggctggagctattaagcctgtgagaggctgtgtgagcagtcgccaggctgcgtgtgctctggggggtggagtgggcacaggcagggggcggttggggggaaggagtgaggagaggggagaccttggtggtggggaggatagaggaaggttcagcagcaaacttgggagcaccaggctctgcaacctgggaggacaaggcaagtgccctggccaagcgttgcactagctgtgtgatggggacatgtttcttcctgcctgagcctcagtttccttgcttgtacagcacccacatggctgagctgttgtgaggattcaggggaggaactgggcagagcacttgcatgtaatgtgtcactgctgtgaccgttactggtggcaggaaccactggtaaaccagggatgggagaatggggtcttgtatgtagagtttataatcagccctgagcccagagagcctcattaccgacagcgcaagcaggacaggtcttcgctactccccaagagagctcagtcctctgcctccgcctctggtgtaaccacagttcacwttcccatctggaaacccttacctacacyggctctgctctctgcattctcactctctttctctctctggcaaactgggctccatctgtacaatcctaaccatccttcaagrtaaagctcaaatgccagattctaagggtcagcagggcatggtgggwggggcctgggctctggaaccagacagagtgcctcagtccaaatccaggttccaccactcaacagctgcgtgaccttgggaaagtcacttaccttctctgtgcttctgttttcttatgtgtaaaatgagaataatagtagtacccactattagggttgttgaaaggatagaatgagttaacaaatgtgatgcacttagaacagtgtaagacacagagataatctacaccagtggtccctaatctatttggcactggggaccggtttcatggaagacagtttttccacagaccaggggagggggatggtttggggatgattcaagtgcrttacatttattgtgcactttatttctgttattattactttgcaacatataatgaaataattacacaatttaccatcatgtagaatcagtgggagccctgagcttgttttcctgcaactagacrgtcccatcttggggtgatgggagacagtggcagatcatcaggcattagattttcataaagagtgtgcaacctagatccctcgtgtgtgcagttcacaatagggctcacgctgttatgagcatctaatgccaccactaatctgacaggagggggagctcaggcagtaatgccagcgatggggaatggctgtaaacacagatgatgctttgctcactcactgtgtggcccaattcccaataggccacgggtggtcacagactggtaccagtccatggcccaggggttcgggacccctgatctaaacaacaacaacaacaacaacaacaacaacaacaacaacaacaacaacaaacagcagcagcagcagcagcagcarcagcaatgtagtatctcctttaggaaatgtctctgaccatgaagctgacttaatttctcctcttctcatggccatctccctccaaaacacctagcaaagagaattgcctatagtagatgttccacaaacactcactgaattaagcagaaagatgaaagcatgtagaaaatggtaggttagaggtggtgacattcttgctccctcctttcctcctcctttttcttttcttcaatggatatatttctttatrccagaaggctccctggggagctgagcctttgcctggagagttaaagaacaggtggaaggcagaggtaggcagcaggtctgcatcttgggggagcccaagcctgtgttctgttccctctctgagcatcttctctctgagcatcttctctgccctggcggctgtcactgttgcatgtcggggkagggctgtgtgggtgtctgaacctttgtcaggctccccaaatcctccccaccctcaccaggascctttctagctgtccagaggtgcctggttctgcctccaggtctctgtcactgcctcccactgtgtcccacttcagacctttccagggcagctgctgagcttcccttgtgaagctttgtctgtgtctccagtcctcagtgtccacccactgtgcaggtggccaggtgagatggggtggctggttgtggggctgcaaagtggagtggggacagacaggcttgttgctgggatctagaaggcagccttggagaacgtgggcctgggacagggtttcttggcttcagcactcctggcttttggggctgaatgattctttgtwgtgggggctgcccttgcattgtaagatgtttatagtatccctggcctccacactctagatgccaatagtattcccccaggtgtgacaacaagaatgcctccagacatcatccagtatcccctgactgagaaccatgarcaagcaagaggatcrggggctgtggagtacaagttgtgccaagattctcggcaggagggattctggcctttcagaggcactccaaggaggccagtgtggctggagctgagagtgaggtaggcacagtgaggggcacagcttcccaaatgccccaagacccaagccagcaacttctggtggcagctcaggcctcaaagctcttcttaaaggcagagaggagagtaccttttaagcttcaaagcattcccttggggagcaggctggggtgatagggaaaggcargcaggagggtaggacatcttcttggctgatttgggagggctgatcctcagtccccagatgctgcagagagtgggtagaggggcccagtggtgttttggagagccaggctgcactgggtgcctgtcgtgggcagggggtgcctggagtgctgcaaacaccaggattcaagggcacgttggagggttctaggcagaacagtgactcatgattgctccctcttacatgaggctgtggactacattcttctgtccctccccctaaatgtatatgctgaaatcctaacccctaaggtgatggctttaggaagcggggcatttggttttaggaggtggggcatttgttttaggagatggggtatttgatcaggtcatgagtgtggagttctcatgaatgggattagtggccttataaaagagatctcagagagctccatcatctcttctaccatgtgaggacacagtgaggagacggccatctatgaatyagcaagagggccctctcaagacaccgactctgccttggtcttggacttcccagtctccagaactgtgagaaaaaaaggtgttgtttaagccacccagtatatgggattttgttataatagcctgaacagattgagacagatggccatgggtcatatagagggtggttaggtgcacagggagaccaggaggacgtgctggctaggcagggagggcagggcctgccccaagctctgcactcttcttggtccttggcttctcaggtgtgagcaccaagtgggaagagacggtggaagtgttgccctgcctccacccttgctctggcttctggctttaaaccatggctgagtctctgccatctcccagctccctgacaagtatgyctgctttctgggaagccacarttaggacccctctgagacactgcaacaattactgcctgccatgccccccatcctcctttgggtctggcatagccctcttccaacctggcttgctctgacttcccctcaggacycactgccttgcctggttggggctggggatggagttcagcaatcagaatcaggtgacttgagtctagccaaggtccctggggcaaagtggaacaggacatcaagcccattccagggctcccagaccggtggctctggagctgcattggcccttctgtgtttgggcagctcccctaggctgtgtggcacagttgtttaatgccttttcccatcaccataagatgttatcctcacaaatcattctcctaggaacatgctgagtttacatcctccagagtaggtacatttctcataaagtaaggggragtattagtctgttttcatgctgctgataaagacatacccgagactgggcaatttacaaaagaaagaggtttattgggcttatagttccacatggctggggagacctcataatcatggtggaagatgaaaggcacatctcacatggtggcagacaagagaagagagcttgtgaagggaaactcccctttttaaaaccatcagatctcatgagactcattcactatcacgagaacagcacaggaaagacccaccaccataattcaatcacctcccaccgggttcctcccatgacacatgggaattgttgagttacagttcaaaatgagatttggatggggacacagctaaaccatgtcaggggktgctggtaacatatgccacatgaacggcctgtcaccatcaccctgactggctgggtgtcatcatgggattttatcttgatgagtgcagtcccatgaggacacaaacctcattcctccctcttgccctgcatctgcctctcctgtcatttctgccacttgactgacctctgcragggtgctggagtttgagatgtctccaaacctaaatgctccatacataggaaaggaaggaaatgctttctaccaggatttttgactggctaatatatttagaactttattttgaatctgtactttccaacaaattatccctcttctgaggaaaagtacacacacacacacacacacacatgcatgcacacacacacacacatgcatacacttatatacttttatatctggcatcacttctctcagaaacatttctcaggtgacaggtagtccctgcaaagagccagaggtctgggcctggagtgaggaggattggggttccaggtagagtggwgcctctgattttctgggtggacatctgtgacccattctccccagttcatgtctccctaggcacatgagaaatgtcatgccacctcctggattggcagcacgtgcccgtgtcctgcctggtttgcacataggcattcacgaggcaaagccgaagtgtgtagtggacgctgagtgtcagggagggagggaaggagatggatcatggatctctccatggcctcgtggccctcattctttttctgggctctgggcktctgggtgggagagcaggggtctcaggaaacatggtccccagggatgggtctgtgggaagctgggcactgtgccacctccagaatagcctggcagtagggtgagcaacaggccagctgtctcctcctggagccaggggtcaaagactggtcacctctgagtgctggggggtcccttaccaaggctggcagggcagggygggcttgcagyaccgacrtctgctcttggagctcagaatcatgcacagggtcatgttgagcatttccacagcataaaaagtcacattccaggagctgtgtgtgagtgtgtgtgtgtgtgtgtgtgtgtatatatatatgtggtgggggttgggagggtcagggtcacagctgccacctcattccagccagatgtctccctgcttcctgcaggaacatgggtctccaatggttcaagggacgatgaaaatctagtgtgtgtgtaaaaatctaattctaaaactgaattccaaaaattaaaaataaaacacatgacaaaaacgacacctccctgggctggacctggcttgcttcagtttgtctgtgacccctggtctagaaggacgtggccaggccaggccatgacagcagggcttgctgaaagggtggtctggagggcttccttggaggaggtgtctcttggcccacagctctgcggattgggtgacccctgaagaaggcagctgggggggcctggattagccagatcactccctgtggtggccaactctggccttgaccccaggcccacaggcctcagtttctccatcgctccagtgacgggctggatccaacacctgtgggccaggaggctgagtctctgtgagtggcagatgccgtctgagcaggcagtctcattactcctgctgtcctgtcctcccactgccgagggacccacccaccctgccctgcactcagcctcagccaggtgccagaacggtcagcctgggtcttctctggaactttaaaaagcagamccagtagggcaatgcttaacccaacagggtagctctgcagcagtgaagagcaggctttcttcctataaattatgtcccctgctggtccctaggtgctctggccccagcgttagacagtttcctctggtacctgcactagagaggaagtgtgatagcctggctcttctgatgacacgggcccggggagatgcttctcagccacatcatcaccttagcgccctgccttgckccagtgggctgctcttgggcaccaaatcagtgctctggggattagggagtcctgccttcccctcagaaggggacactgagccttcctgttcccatcttcttagtgcatctagcacttccacaggtagctggaagaatcagaaatcgatgattcataaagyggtgatttaaacaataaaggcaaggtgggggcrgctctagccccccgtgatggagaaagtcggtgtctgtggacccttttgtgctttcagagagcacaagtggaaagccaaatcmgtgtattatgggttggaaataccattaattggagaggaaattgagaccagatattaggaaaatatatgatggtttttacacgagggccaggaaatcatcagggctgacgctgataattcmcctaatgctgcacgtcctgtgagtcatgggctggcgggactgacacgctcgctctcgccctgcacactgcctgtctccactccagccccgctcaccgttcccctgcccaggccgtgtctgcactggcaccataaacctccattatcaraggtttaaaactgggccataaaaactctagggctgagacgtggcatgtaaggtctcagtctgatcatggccatccccttccagctggggacttaaaaagtgggttgattgggctgaaaagacagctaatatgttctgagcggagaggaggctgggacaggtgggtgtgagcgtatgtgtgagtgtgggtggagacgaggccgggggaggtgtgtgagaatttatgtgtgagtgtgggtggagacgaggccgggggaggtgtgtgcgagtgtatgtgtgagtgtgggtggagaggaggccggggaaggtgygtgtgagtgtatgtgtgagtgtgggtggagatgaggccgggggaggtgtgtgtgagtgtatgtgtgagtgtgggtggagaggaggctgggggaggtgtgtgtgagtgtgggtggagaggaggccgggggaggtgtgtgtgagtgtatgcgtgagtgtgggtggagaggaggccgggggaggtgtgtgtgagtgtatgtgtgagtgtgggtggagacgaggccggaggaggtgtgtgcgagtgtatgtgtgagtgtgggtggagacgaggccgggggaggtgtgtgtgagtgtatgtgtgagtgtgggtggagaggaggccgggggaggtgtgcgtgagtgtatgtgtgagtgagggtgtgcacacactcggtatgtgcatgtgtgcatgactgtgtacctatgtgatgatcagtgcctgcacccacttgagagggcacgtgtgtatatgttttcctgtgcatgagtgtgtgtgcgcgtcagtgtgagtgtggcagcactgtgtgattgtgtgcacatgtgaatttktacacatrtgtgagcatgtataagtatgtgagtggcatctgtgtgagcatatgagcatgtgtcaattatgagagcatggtgagaccatgtacagatgtgtgaattgtacccgttatgtgtatgtgtgtgcacatgtatgtggatgcatgtggatgtatgggaatgtgcatctgtaagcatgtgtgtgaacttgtgtgagtgtgcatgtgtgagactgtgtgtgagactatgtacaggcatgtgaattgtgtgtgtgtgtgtgtgtgtgtgtgtgtgtgtsatgcttatgcgtcattactggggtcatcaggatcgtcataggtattcacttatgaggcasaagccccagttcagggtgtggctctttactggggaaggaggaggccccagccagtgggtgctgcgtgttcctggggktcttaggctcaggtgtgtgggagttgaggtgctgggatgatgatggcttcccacaaccagctctcaccacgtgccaggcactgtgctaggcgtgtgaaaacccccagctcattgtgtcctactgactctgtgaggggaggggtgatattattcgaagtccctaggtgaggaagcagagcgtcagagaggtcgagctacttccttgtggccacacagcagggcaggttcagcacctgagccaggagccgccaccctttgagtttggaaagccactgagaccacccaaggcaatatgatcatgccacagatgggaaactgtgcccaagaggggcaagctgtgaccggggtttcctggtggagtgacacccaaccgctaccccagggtcctccctgcactgtgccactgagtggaagcagaagggtgggggtgggtcacaggagcaactggggctccccagcagcagccaaacccaatgtaagcaagcttgggtgcaccggccagggccactgagccccagggacaatgggaccaagcatcgggctatctcagggatcagttcccyaccctgctccgtgtctctctctttaatgcataccacctctgagagctacttgccccaccccctcaggagtgatgggtggcctctcttccctagttccggtgggaaaagtttcagggaaggagcctaactggtttggctcaggtcacagggcttttggggatgatggtgggaagtctccaaaagcacccctcatttggagagggaagttacccccagatcaagggaggagtgtggggcaggtggatgctgactgccttcctggatatgcatgttcctggagcacataggcccccaaagctgggcgtatgtcgcctctggcacatgtggccacaggagcctagatttccctggctttgaactggtattctggggaaggccagacacaggaagggcagagggagaggcactgggaagagagggtccttgcctttaggggaagagaatcaaggcctgggtttgtgagctgtagggcagggagaagggagccctgagctggcatgggctgcctggcacgggcagcctggtatgggtcagggccaacaggctgccaccagcaggctatggtggcctcaccatgtgcagcttctcctgggaacagggagtgtgcttgaaggactgtggggttgcttcccaaggaatcaagtggctggatgcggccccagatgtgatccatgctgtgcttgtgtacctggagatgcgagagaaggcccagaggcagttgagagctgggttgagctcacacagtgctgcaggccccagcgggttcagaaagaagatgttctgcttccagcccgggcccctcccctccacagtggctcagggctttccccagccccagacctccctggggagcacctggacctggtgacacgaccccaggctgtgctcagctctggctctgctgctcacgagggtgggacagacatgacacaatgggcgccaccggtcctggctgcagcagatggggccctacttgtctcctcctttastgactcatgtgggctgggccttttacaatccagggcatttaggaaaagctgctataggatacgaaggtcctgagaagtcctgcaagtaagagcctggccagagctggggccctgctgtgtgtggccctgaagccgggagccgggctgctctgctgaagatgggaggcgggagctccctgccggtcacagagccccgastgtgtgcgcacgtgcgtatgaaagaggggataaagggcgatttgttggattagaggctgaaatgccaaatgtaagctagaaggggtttatctaccttttaatgtaattgtgagacaagcaatgaaatgtttactgtttgcaggctgagccaggaataaaaacctgatcaaatacaaatgcctgcttcctctgcacttctgctctgcccatgaagatgactggtaggtccatctcaggctgcctcctgaggcagagcctggaaaccctacctgctggttgccttccaatgagtcagcaaacccgctctaagctcctgtatgtggggccctgtgctggtcagcggctggaggaggcgaggggagggtgagaccctccccggggacaccactaacacctaatgagaccctgcagggaccgcaccccctggggagggtcttgggctcaccagcactgccttgtccaactcagtgtattgttagagtgggggcacctctctttggagggtttgctttttggaggccacagaaattgggggaggctgcagtggaagtccagggtccagagggtcagacgaggagaagggattctggagtggcctccataggaagggccctgggaggaagctggtccgygtgcaggtgtgttactcactgctgcagaagcaacttgctgaaggggttggcccctgacgcggaggtttcggagctctagaaggcccagcacctgcagcctgggggctcactgcccagcagccattttaaaagttcatggacagcttcattccaaacctcaagagaaacacaagccaagtgccagcggcactggcttctggcctttggaaggtggtcctagtgcgttaatggagaactggggcctcccacaggttgaagttgtgctgatacctacccagaaggcaaggattgggagctcctcgggttgggagaggtgtggacagtgccccactccctctgcaagcgcccctagagggctgcttcaagaacagtctggccccacagagaggtgtgtctggctaggygtgagtgtaccttaggagaggtttctaatccttcatgcctgtctgccaagggtgcctcagagcacctggtttgtccccatcagactctctgagtgytcaggaagtggagtggagggcttggttgagtagagggcttggtggagtggggagcttaatggagtggagggcttggtgcaggcccccattgaattcccagtcagggctaaccaggcattccccgaggcaggaaggcactggtgccagcagccaggctgtggctggaggaggctctgcccrcagggaagcggggaggccagcccggggctggctcagctctcagtccagcccgctctctggagctccagataggcagcccaggagctctcaagggaccatggatgagcctcctgggtgtccctcttgctcctgtgctgagatttctctcccagcttctccctgtctgggcagcttgctcccagcctgcttgctggcacagtgtctatgacaggtaccacgccaggtcctgggctgcagcattggacaggacagaggtggccttcgtcctcttggggaayactggtgaacacacattttcctgaagagcaccagtcctgagaggtactctggtggataaaaaagttttaccatcaaagaagtgtaagaaatgccactcactgaacrtcctgtgcagactagtgttcctccagaagaatttcgaagtcccaactcctggtacttataaataggayctttcttggaaataaggtttttgcaaatgtaattaaataaatgatctgcagatgagatcattctggattgggggggcacaaatccaattagtggtgtcagaagaggaatgagagggagattgacaagtgtcagagagggcctccctcccttagagctttcagagggagcgtggacctgtggacgccttgatcttggacttcttggctccagaactgcgagaggatgaattgctgttgtaagccacctggcgtgtggcactttgttgctgcagccccaggaaacagatttaccagatgtccttgctggagattgacagagtattaaagatacagaagatgctgacaagtccmgccgtaaggtttagaccaggttaaacccaggtgctggagactgatatcccataccccgagccgaagcagagcctgagacaatggcttgtgtgtagatagttaatttgggggatatgttcccgggaagcaggagtgcaccctcaggaaaggtgaagaggggtggagggagaccatggtgggtgactggagaccctctggggcagcgtgtagaacatgcatcagaattgcccactkgagtcgctgtggattttaactcccctgcacttcctagggtggatatgcaccagatggctgagtggcttcctgggtatcyggggtatcccagaggcaaaagcagagaaagccacgtggattgccacagaggcactgccagcacctccttctggtttctcctgcaactgctggagcaaaaggatgagctgagatgtggtgmagggcgctgtccagcatatcaggttgcccatacrccttgaagcctgtaacaccttcttttggtcatccctgggcatccacrggacataggttccaggacctgctttggttccccaaatccaaggatgctcaaatctgtgatgtaaaatggcttgcatttgcacatagcctacacacatcttgtcaagtgctttaaatcatctctagattacttatgatacctaatacaatgcaaatgctacgttcaaagtattacgtggtattttaaaaattgtattatttttaatttttgtattgcttttattgatttttcccaaagatttttgatatttttgaatctgcagatgcagaatgcatgggcgtggagggcggacagtatacactgaaaccctgatgcatgcggtggtccatgcagagttccgcggggccctctggaaacactggcccagtgaattgtgcattgaattgaaaacatgggcttctccatcactcactcattcatccaatcattaattcagcaagctttcttccagagggcaagcggccctcttgcttgtcctagccccagagaggagcacagtctcgggcagggctcagtgcacaaaaatacttatgtaaaggactagatagcacatatttttggctttttgggccayatcgtctctatcagtattgtagtctgatggtagccatagtcaataagtaaatgaataggcttggctctgtttcaattaaactttatttgccaaatgagaggtgagttggatttggcctttgagccacagtttgctgatctgtggtcagaacccatggagatattaatacacagcctgggtttcagaaagcccagaagatggtgccattaacactgttcagggaaatcatggaagacttcatggaaaaggggtaggtcttgaaggatttgcaggagtttgcaggatagaaaagtagggaaaggcattccagacagaggtgactgtgcccaggagagcaccctggatggctctgaggaatgagactttacagcaactggaaaaaagaaagttgaatttagtaagaggaaagttacattcataattaatgaaaattgagggatgattctccaggaagtgttttcaaatgagacaagctatgggcagttttagaagcagagatgggtgggaggagaagacaactccttcttttttcctttctttttttccaggctggagtgtagcggcgccatctcggctcactgcaacctccacctcccaggttcaagagactctcatgcctcagcctcctgagtagctgagattrtaagcatgtgctaccatgcctggtgaatttttctgttttttgtagagactgggtttcaccatgttggccaggctggtctcgaactcctggcctcaagtgattcacctgctttggcctcccaaagtgccaggattataggcatgagccactgtgcccggccagactccttctttcttgctgaggctctctcccctgggaccatcctctgcagcactcaggcctcagatgaacttggaggctggtccaggggtctgcccaggactaggggcaggtggagctcagatccctgactctgcatcacagagctcaccacgctgcctgccayggccaccccgatgggcacatgccccatcaccttggcaggttatgattactcagggaagtgttagayagaaccctgctgggctgcatggagctaaaacaatccaggatctgtgcctctgtgaggctgtgtggggctggtgggagggtttccctggaggcatccactgggggccggggagagttctgctggggctgccttcctgactagctccagggtttccagcctgtgctgggggcagctgctcaggctttctttcacctgtgtgggcacgtgcaggggtggggatgccctctctgcagtgccagccccacagctgagggccagaagctccctatgcagagatggcctcggtcagagatggctggcgtttctgcctttcatcagggaaactagtggtgcaagcagagggactctcagacaatctggtgacttggcccttagtggtggagctgttgccatggtctatggggagggagccctttgcctctgaatcatagtttctgagttttgaactgtagttctgggtttgtgctgagactctccccaacccccattctctccagagccagaaattgctttggagtsggagtgtggtgaaagaaggtaggtcagtgtcagttgtcacaaaatcgctgcataaaaaccactgagacctggtgacatgcaattgtaaacatgtgtttttttttccctgtgcaacagtgggtcatttgtggctctacggatctgagccaggcccggcagggctcactcatgggcctgtggttgtctgcgggttggcaaggtggctrtgggatcttcttccacctagggcccttggctgggcccctgrggccagtgtggctctgctccacgcatctcctcctccagcaggccaacctgggcctgtcctcctggtggaagtagaagcgccaaagagagtggcakctcagcctcgcattggcacacacactcactgccactgggttctgtcagccacagcaggtcaccctgctaggttggagaagtagatgccacctcctcagggagtagctgcaaaatgtccttgggggcctggaggcagggaggggtggagaactgtggctattttttttgcwgtcaattcaccgtaccatgtggactccccagtgtggagcagaatctgaggactgacttgctaagaatctctgggcaccctggatagaaccttccctttggctctgagcatggtggctcacacctgagatcccagcacttcggaaggccgaggtgggagaattgcttgaggccaggagttcgagaccagcctaggtaaygtaacgagaccttgtccctacaaaaaattaaaagaaaattacccaagtgtattagtccattttcacactgctatgaagaactgcctgagactgggtaatttataagaaaagaggtttaactgactcacagttcctcatggcaggaaaggcctcaggaaatttatgatcgtggcggaaggggaagcaggcacgtcttacgtggcggtaggtgagagaggatgtgtaggaagtgaaagggtaagagccccttataaaaccatcaratctcatgagaaatcactctctatcatgaggacagcatgggggaaccacccccatgatccaaacacgtcccaccaggtctttccctcaacacctggggattacaatttaagatgagatttggtggggacacaaagtctgacccatatcaccaggtgtgttggtgcacggatgtgggaggatcttgagcccaggaggttgaggcttcagtgagccatgaatgcaccccggcactctagcctgggtgacagagggagcccctgtctcaaaaacaaaaagagaaagaaccctccttctaagttatcttcattcttcctacgttcccactgaacctgcccacagaccctttcttggcacagcccttgcagcctggcctaccgtcggcttctcctgaacagcatgcctgtgcagctcttgcccagagcccagaaaccttctggaaaggggaagctgggaggagtccgtctctatttcctctctctctctccccagcccctctcctgtgggaccgaccagtggagctttcagggtgctccatcttcctctctgggctactccgggctttatctggcaagtgaggccccactcatggggctgtcgccctggctaggtacagataggtcctatgcatggatgacttcaggcaattctcacaacaaccctgccaggtcatctgcattatccccggggtcacatgaagaagtaggttaagtaaggggccaggtcccccagctcctcagtggcagagacagggctgaaactcagctgggaatgaccattgagtatggtggtttcttacccccatcccacagattggaagaccgagaccctcctagtcaagtgacagattccccttctccagctccgcagtggcctggcagataaatgctaggttgtttttttttaatttttttttccccttcaagtttccatctgttcacgcagtcacygaatttatgcatgttcaggcaccatctgcgactgcaaccccatttccaaatccgaaagcatttttcctttttgtacttaacatgcacagcggcgcggcggtccagaataaataactcttcttggattgccaaagttccaggggcctccacgggaaattttctctgaggagtgggggaggagggaaggattttgctaaactggaattttgtttttctgacgtgggctatttcttctggctgacattttagcgggcttccatctgctggctgcatttcatgacccctctttgttgtctcctttgataacagaaaatgtgcaccaccgctgagctgctgtgtatgcgtatgtgtatgtgtatgtgtgtgtgtgcgtgagagtgcatgtgtgtgcgtgtgtgcgcatgtgtgtgagtgcgtgtgtgtgtgtgtgtatgagttggcatgtatgagttggtgcatgcctctgagcccacacctcatgtctttgaaagcccttctgattgcccctcaccttgagaccatcgtggtcacagtcacacaatttgggacttggggagcgatgacctggctggaaagctggaagatgtggtgactgcacaggtcctgcaacttccagagcttctccagagctcccagaggccagaaaatcagttttattttagattctgagaatgaaatttagaaacccttctctctccaaccttttcctggaatrcttagtagttttctgactgtaccatggctaggttaattttccttattttattttttattttttgctcttgtcatttcctgtttccaaaccttccacagatgttatccatcatcatcagtgtggctggctccctccaggctgtctttctgtctggaccatttctgtcccctcctgccctgggagggtctctctcgatgcctttgcctgtaccacacttctgtgtggtgtgtcctctgccctccccatctttccacactctaactgtcctgtccctgtcccagaggktgtccctgcctgctctgtgtccctgagagccaatgctgcagcatcctcccagagccagtcccaggtgacacagagccccttcctgtgtcttcctcatgtgtgtctccttcggtgctccaccgcctgggtggcccacgtttggtggatttcacatggaatctggagatagagtctgatgtgcatgtggtttggggagctggcttctctcagcaggtgggagatttacacacaggagcaggaggatcctttgagcccaggaggttgaggctgcagtgagctgtgactgtgccactgcactccagtctgggtgacagggcaagactctgtctctaaaacaaaacaatctgacatcctggtccttaaggtgatggttttaggaggtggagaattggggggtgattaggccactggggaggagccctcatgaatgggattgacggattaatgccatttttgaagaggcctgagagattccttgctgttttgttagagtgagaagatggccatctgtgaggaagtggggggccctcatgcaataccaaatctgctggggccttgatattagacttcccagcctccaggtgtgagcaataaacttctgttgtttacaagtctctcytagtctctggtatttttgttatggcagccgaaatggatgaagacaacacctgaatgcgcccgttcctaggcccttctccaagtcttggcttggtgtttgcagctccccctgcatcaagcagcagaatgcagcttctaagagtaccagctttgacagcagagagacctgggtttgaagaattctagctctgtgactggacatggcctgtgctttctgtctggactatttctctcccatccgcccttggaagcaaactcctattcatccttcaagacccagatgtcagatgcctcttctaggaagcctaccaggccctccatgggccacatgtacaggctaagccatctacctctgggctggcttctcttccctgtgtgctccccaggtcagagaccgtgtggctcttgggggcccacagagctggcagcagtgaacattggatggatggactgtcattttgtagcaacaggagcctcccgactcccrtccatgcccctacaatggattagtctgtagggcccagccctttctgtgggcgctcagcacagcatggtcacccgctagccctggccgggcagcccctcctgcggcagggagtccgaaagcgtccggatgctttaactgccaccggccaggccctgcaggagcccagctcagggaggaaggacaaggcatgccttttctcctaaatgggagctaacgagtgtggtcccccagctgctcactgttgtcagagctgtgccctgtcagctggaggctcaacatgtggctgtctgtggtggggcttctggggggacggggtggcctgcagaatgcccatgcagcctccactcctggcagaaggcctgtgcgctaggcccccagctgatacatcgggagggaaagagcacctgtgctctccccacctgtgcttctccttccctgtgggcaggcgggatctagccctgcccttgctggaggtccttcctgggaacctctacacagccaggctctgcagtgtcggctcaggcgtgcactgagggtggcccctccacagcatcctcaggacctcaggcatgtgacggtgcttgggggacatctcttggctacaggtctgccctttctggaccatggcactggatgtagctccagggactccactccttgcagaacaaagggaggggaattatcytcattcagctccagcccagggagatgccttcacatctcccctctaggagtgcctgagctccctagagcctatgacacaggggacatcctggccctgccccttactgaatgtgtcgcyttcactctctgagtctccgttgtctcattcacaaagtcagcatgataataatcatacctgcctgggttcttgtgaacaacaacaaaaaccaaacaaaaccattatgcagaatggaaaagctttgtcagcatacagcactgtccttgtagaggcgagtggccgggcacccacagcatggagcaccagggatgtgccagctaccacacgcaggcagagacagacttcctcctgcttctgcttgcgggatttgatattgtggtgagggaggggacagatgctccataagtgagcccaggcacatgtcatccagcccgtctatgtgcacatcgggcctctaggggccagaaagtggctgggtatttcacccccatccccaggaaagatgaggcccagcggggcaagatgcagggagtgggctctttctggcagtcacaggagtgggttctgattccaggcaggcttgctgtatcttcttggcagatgccgtctggatccttaggagctgcagggtggatggcaacaaggtctggacgtcactgggcagtgaagcgggggcctggttggccaagccattgcctgatggggataccaaagaggggtctagacagggaactgcaggtcctccccattctgccatcctcttatggtccaggggtatgaagccttccagccacacaatctcgaggacagaactcgagcatgttggccctaaaagcccctctttccaccaccccactgcaaagattaggtccaactctctgaaggttattgaggcggagaggcaagtgccaagggctctggattttgcatctgggagaccttaggctggtaccttcttctcactgggcctcagtttccccctgagtcagatgagagggttggaccagatggtawcaggcttttcatctgtggcttgcttgtgaccatcaaaaaaagcaaaaacacgttaaagcctcgccagtcatcattttccaagtttcccctggatttttccatyggaagacaaaacgtgatgagaccatatgtcaggctaattgttccccaaacagaatttaaacatttgaatatgcttgcaacagggaagggcaggaaagaaaatggtgttgcagggggtrgaggtagtagagtctggctctgtccctgggatgtgctacaggggtacccttgccttcagggccatggggctgcctggggcagcaagaggtctgtcaaactgtatgaaaggtcaaggctggtgggccatggttataaagtccacccacccactcactctacaggtaacagcagagcactcagctgaagcctggcccagccctgggtgctgggaacctgaggatcagggagggagacagctgaggtccttgctgcttyggagctcccaggtcagcaggagagacaagtgccaggatggaargggccacacaggggctgggggtgccagttgaggattaggggaggcctaagggatcgggggagccaggtaacaaggaggaaggggcaagcatttctggaagagaaggcagagagtgtgagggccagggtgggagcagtgtggccactggtcctgtagaaggcttgtcgcatcagaaccagaggggtgctggggagaggggcacagggttggggggccggaggggtggctgggggtcccatcacctgtggcgggtgggctgccttgtctgggccctgcaagtgatgaggaggggctgacagcctgcagcaggggggtgacaggacacctctgggcttctgtcccagctctgtgccttcccctkatgtgtggtcaggtacacggaggaggtgcaccccagggagggccgtgagtggagttattcctcacatcctttttttttgcatttattattatttttagttgaccataataattctacacattcattaggtacagtgatattttaatacatgtagaaatgtgtaataatcaaatcagggtaattagcatatccatcacctcaaacatttattatttctttgggttgggaacattcaaaattcgttcytgcagctatttgaaaatatacaatacattgtgttaatgatagtcatcttacagtgttatagaacactagaacttattcctcctgtctagatgtagttctatagccattaagccatctctggctgtcctcccacccttccctgcttctggtcatcactattctaccctgttcttttttttttttcattagagacaaggtctttcttggtcacccaggttggagtgcagtggtgtgatcatggctcattgcagc

SEQ ID NO: 1599 - DNA, 26665 bp, Homo sapiens
taaaaaagtatctcaaaaatatgtttaagagaaaagagcaagttgaaaaaaaaatagtgccattagtcgttacatcagtgtacatctaagctgccatctggtggtggttttcttcctcctgaagaactcttagtgtttctcgtagttcgggtctactggaaacaatttttctcagcttttatttgtctgaaaaattctttttttttttttttttttttttgagatggagtctcmctctgtcacccaggctggagtgcagtggcgcgattttggctcactgcaacctccgcctcccgggttcaagcgattctcctgcctcagcctcctgagtagctgggattacaggcacgcgccaccacacccggctaatttttgtatttttagtagagatggggtttcatcgtgttggtcaggctggtctcgaacccctgaccttatgatccacccacctcggcctcccaaagtgctgggattacaggcatgagccaccgcacccagctgaaaaattctttagttcccctcaaattttttttttttttttttagagatgggaatctcaacatggtgcccaggccaggtgggacttgaacttctggactcaagcaatcctcccacgtcagcttcccaagtagctggaactatagggatgcaccatgaactactaatttaaaataaactttctcctttattagtattttttagtagagacggggtttcaccatattggccagggtggtcttgaactcctagcctcaagtgatccatctgcgtcagcctcccaaagtgctgggattacaggtgtgagccaccacacccagacattcatctttatttttaaaggacatttttactgaacataaaattctctgagttggcagttttttctttcagcaatcttaagatgtttatgccttctggcttcaacagttggagcaagaagattgctgtaattcttatcttggttcctctggatatttttaaggttttctttctatcagcaatttgattacgatgtgcctcataaggatttatttgtgtttatcctgcttggggtttattgagctttgtggacttgtacatttatagttgtcactacagttggaaatttttaagccattatttctttaaatacgtttctatctcaagaagtacagttatctccaaatgagcgtcatctacatgtccacaactctgatcagaccactcttagagccagtaatgattattttaatacctacyatactttgtgtatatttactcctcagtaaatatttgtagagctgcacatagggaatttctttaacacctttaaagtttatttatttaaataagaaatacatgcccatggtaaatatttcaaatagtacaaaaatatttcaaatagtacaaaaaaggaggtattctgtgaaaagtaagtctttgtttcaccaaagataccaatccctgccccctccccgtcctaaggccatcactgttagcatttccttttttctcctcccaaaattgtctgtgcatgttcaagtatatatggatatatatccttgtgctagcatactatatacactgttctgcatctttttaaagtttaataatcttggcgatcattctatatcagtacatataaagtgggctttttatgaatggcctaacattacatcatacagatgtatcataatttaattaagtggtgccctgttggtggatattcaagtcgtctggtcttttgctattgcaaataatgttgcagtaaagtaaaatgtaaaataaaagtaaatgtcttacttacttaaaaacctaytttaaaagtaaatgatggactttaggaggttaagaattaaaaattaataaacatataaataaatgaggtactctagcacttggggtcatgctgatgttcttgtcatctaaatttttggtttatatgctgcaaacattgtcaaagaaatttcctatttcttttacaaggaaaagagaaaaacatgtcaagaatagggagtactattataagaaagcaaaagtaacaactttgaaggtttgaatttctggtgttayaaactttgtatgctaaaaagataaatgttagtttccacttctaatgatcaagtcttaggaagatataagccaataagatataagctgcttctgatggtacagcttcagggaaacaccagtgagaagcacgtgtctcccctgatgagaagagaagtgctaggagattgagcctcagtcacaggcagatgtgtgtcttgacagcyacggtgtgtgtcttgagagtttaaaagaygtgaaagaatgatttgacccattggcttgctcgctgaataagcaccaaggcaagagagcctggtagttgtcctgcatagtctaggaaggacattctgagaaggataactaatacttcatccctcttcaacttgatgcaacctgaagagcaagtccttgggtgaaagtttcttgtccggtaccaaagataggagayagcaggtaaagggaacaagttggtaccatggcaatggtgtcccagtaaatttttattttgttttgttttgtttgcaagaacagtatgggataaacaatagcaaatatacagccttggtttccccaaatcctacaatctcagtgcaggaaggtcatcttcagcagtcagctcagaatagcctcaagggacatgatgtctacagcttctggcttcagaataatgtcctattactgtcaagtggcaccccccaccatttcttcaaaggctgtgataagttttgcacagatgagggcagcagaaaggaggtagttgctgctagacaccatccttctctgtatattccacactgaccttgctctaggcaaaggcccccaccacaaaaacaatagggtcactgytgaacaccagctctttttttttttttttttttttttgagacggagtctcgctctgtcgcccaggctggagtgcagtggcgggatctcggctcactgccagctccgcctcccgggttcacgccattctcctgcctcagcctcccaagtagctgggactacaggcgcccgccactacgcccggctaattttttgtatttttagtagagacggggtttcaccgttttagccgggatggtctcgatctcctgacctcgtgatccgcccgcctcggcctcccaaagtgctgggattacaggcgtgagccaccgcgcccggccctgaacaccagctcttacacctacctcgctgatgcctggaatggaaaaagaagtgccgattttctttttctttctttctttttttttttttagacagagattcactgtgtggcccaggctggagtacagtggcacaatcttggctcactgcaacctcckcctcccgggttcaaatggttcttttgccacagcctcctgagtagctgggaatacaggcgcatgccaccacacccagctaatttttgtatttttagtagagacagggtttcaccatatcggccagactggtttcaaactcgtgacctcgtgatcctccctccttggcctcccaaagtactgggattaaaggtgtaagccaccacacccagccagaagtgccaattttcatacatccaactgggaagtgatctgatgttggattcttttttctttcttttttttttttaggtggagttttgttcttgttgtccatgctggagtgcaataatggtgtgatctcagctcactgcaacttccrcctcccaggttcaagtgattctcctacctcagcctcccgagtagctgggattacagatgcctgccaccacgcccggctaattttttatatttttagtagagatggggtttcaccatgttggtcaggctggtctccaactcctgacctcaggtgatccacccgcctcggccttccaaagtgctgggattacaggtgtgaaccactgcacctagccctttttctctttttaaatatacaattttaggatccctttttttttttttttgagatgggagtctcattctgtcacccaagctggagcgcagtggcacaatctctgctcactgcaacctctgccttctggactcaagtgatcctccmacctcagcctcccaaatagctgggaccacagggcgtgccaccacacccgggtaatttttgtattttttgtagagacraggttttaccatgttgcccaggctgatcttgaactcctaagttcaaacaatccacccaccttggcctcctgaagtgctgggattacaggcgtgagccactgcacctggccttataatactctttattgtaaatttcatatgaccagttgattcttaccaaaagcttttgttgatttttgtcaaacgctgatatttctagccaacctatgattgcaactgacaagcaagtatagttctgacatgaatattggttgatattttgatttacattaatgagcaaggcaaaagtgaaataacaaagttgtgtattggarctttactcatttgtcaatgacgtgggcaacttcttcgctaaattaggtaagtcttcaaatactggaaggctattttctcagatttttctatgcccaaaatataatagctacagacacatctttaagtttaatctgcataattaacattttctctatcactttagtttagacaatcaacagaacaataaatcaaaccctgatttgtagcacttgctgatttcaagctagctaacaagatgaagttcctgaacacaccctgggaagagatatgcagcagcccaccactgtatactgtttcttttcttttcttttttttgagacagagtcttgctttgtygcttaggctggagtgcagtggcaccatcttggctcatcacaacctccacctcccagattcaagcgatcgccctgccccagcctcccaagtagctggactacaggtacccacaccacacccggctaatttttgtagttttagttgagacggggtttcacccgttgaccaggctagtctcgaacrcctgacctcaggcgatccacccacctcggcctcccaaagtgctgggattacagtcatgagccaccaagcccagccaagtttatatcatttaagttttaaaggctgggcttggtggctcatgactgtaatcccagcactttgggaggccgaggtgggtggatcrcctgagrtcaggwgttccagaccagcctgaccaacatggagaaaccctgtctctrctaaaaatacaaaattatccgggtgtggtggtgcatgcctgtaatcccagctactcgggaggctgaggcaggagaattgcttgaagatgggaggcggaggttgtggtgagccgagatcacgccactgcactctagcctgggcaacaagagcaaaactctgtctcaaaaaaaaaaaaaaaaaagttttaataattgctgtgtttaacaactggtttgtagcattcctgaaaatgtaacaaccagctctcgtgacctgttttggtctggctccagcatacaactgtgccactgccttctcctttgcccactgtttccaaataaataagcttctcagtttagttaacaggtgtccatttctttaaaaaaaaaaaaaaatctccttttctcccatgagatggggtagggaagatgaactccctttttcctatccttagacttccctgggcaggtgaacaagtcccatggaagtttggtgaggggcttcamkgggagscaagaggattaaagcctgtatgttcccgagagccttccttgcatctggccagctcactgctgccttggcataactttgggagggtcattttttccatktggggtaaggctgaatgtttacaaagtggaataggctgcattactgctggtttgtakttggtggaaagagggagaaaagagcctggcacatcctctgtccttcctcttctttttttttycccttttctgttgtcaccatcacattccttgatgtcattcctgccattgtgagctgacaggccctcccagccctggtggacagcccgtaagtaaatggggaggaaatgctggggaggtgggggcagatcacatcaacatcctggcattgggctgggtcggcgtggagccccagaaatgttcccaagcccattcttaccaagaacyaatgagtaaaatcaggggcctcccacctgaggtcagggaaccaggccctggagtggaacttggggtggaaaatggccttctttgtcaactgattcattctccagaattcaatttgttctccaactcggtggtgtttgaaagcaactttatccaggtaccctcgtggagctcagggccagctgtctttctgtttccaaaacctgttcctaggggttggttaggagatgctgtggccttttaaagccctgggggargggggggcggggggacaaagaagccaccaaagctagagaaaaccagaaggtctgggtcccaagttcacctccatttgtgcctaccgtatgatagagctacctgcaggtcatctgttctagggaaattgatttatgctttacaaatgagagatcagagctcagtctccaggcagggttcacaggccctttctgggccacttgtccaaagtggatggttacagggaatgaaggttgctgttagaaactctgctctgaaatccatcctcctcastctgggatggtttagaaacagccttgtttgaaagcaaagacactgggtaaataggtgttgcccagatcctaccattccctaaaaggatggtggtgacatgaccaatggaagtgagcctgggatggggccactgggagtggaaggtggtcgttttcgtaagtatcaagtcttaacgcgggtgctgcctgcctccctctagcggtctagcctgaacccrtgctcctgcgcaggagagcataaccagttaatcagccagtaagcacacactaaacatctactgagtgcagggcaggaggtgcagagaaaaatcagagtgtccctggccaggaagcctatgagtttggtttacctgttatttggtaactgtctaagcaagctctatgtcagagagcttgggccagctgatgcaccaggcatgactgcagagagcaggtgctgggggcattcaaggcattctctctggactttggcagttgaagaaggctttccagaagggtcttaagccattctttgagagactgctgagattttggtaagtggaagagcagcggggaggatatcccagacagaggggcttcaaagtacctaaggaaaggcagggaggctggaatgcaaggtctgcaagacacagacccattcaaatggartgggaaagtagccaggggttataggagagaaggtgggaacagtttgaggtgggtcttgggcttaatttggagactcttcacagagcagygagctrctccctaatggagtccccggattttggagagctgtgtttatggctcctgccgctccacggtccctttrctgtgccccaggagatgtgtagttgggtgatcagctggcaaacctgaggcgagctcattcctaacatacccttggtggagacagagcaataacatgggaagtccagtctcaggatccaatttctagtcatttctatttgggtgtaatgattcagctgcaaatttcttctcttaatgtgtgctttttttttgagatggagtctcactccgttgccctggcatggtctaggctcactgcaacctctgcctcctgggttcaagcaattctcctatctcagcctcccgagtagctaggacyacaggcgtgcaccacctcgcccagctaatttttttgtgttttagtagagatggggtttcaccatgttggccaagatggtcttgatctcttgacctcatgatctgcccgccttggcctcccaaagtgctgttttctttggcctaatattaaaactgtttagattctctgaatggacactaagtgacctgggtagcagcaaacttagaatgtgctagggagaggctgacccgcacagaaaagttcaaagtttgattttttaaaaaaaawttttygatagagacagggtctcactatgttgcccaggctggtcttgaactcctggcttcaagtgatactccggctttggactcccaaagtgctgggattataggcatgaatgaccgcacacagtccaaagtttacttgaagtgatgcaacccacatattagttatagttatagttgttatagtacagttacactgcttcctctctcccccttcctgcacatcaccatcactatcatcatctcaaagcagcattacccacaaacatttattgagcacttactctcaatgtgtacraccctttgtgttttgcagaggatatgaatttcattcctcaacaagggctccaagaagtgtcacttttttttttcaaaatcaaaattcacttttctgggaacaccatctggtcaggctggtgggaaattacatttcagtcatccctggggctttccctcatccccagttccaccaaggactgggcaatggtgtcgatagttttacaaagtctagaacattggctgggcatagtggctcatgcctgtgatcccagcactttgggaggctgagaagggaagatcacttgagcccaggagtttgacaccagtctgggcaacatagtgagaccccatctctattttctaaaaaaagtgtagagcattgggagaaggccctctggccttgggaacataggcgtccctcctcatatgttccttatccaggtccctgtggctcctwagtggccacagctctggtgcttttctgccagccgtgcacagtgaggtggggggtgtcttagctgagacacagtgcccagtggtgggcatccagtctttctgtcctgtgatggccgccttctgcttcaagagaataggtcctcattccactcaagacccagcaacaagatagcccctccatcatcctgggagaagtgctccaaacctccctcaactcaagctgtctgggtcttccccattcaacagctttttcctcactttcctctccttctgggactttcttcacacaatctcccttttgggccactagaaaccagtgctggcttctcctgcccaaagatgggggaatgaaaacttcagtgccactcagctttttcttgctagtgcatctttttagttagataaaacagaggacccagagaagaatgacacagggttcctgcagccaatgaccttaaagtgtatttggggaggccaacgaaaaggatcaatagcaggtcagggcccagcccagtgtgtgcacacctgcccccaagatgatgtgccactttccagcatctgtattccaccccttgttttctgctcctttctgacccatgtacctgaggctgatttccaggtcactaagcccgggaactggagagatgtctgtgaagggtctgccaccgtgatcctcggggtsacctcctcggtgccctccctgccactccccaatgtcctcctgatggccaatgttacctggccccagggtccatttaccacctggagcacacctggtgwcgccccagtcatcaacctcagcaggtaaaggcttgagggagggcgggaagggatggaatgattgactgggatatgcattgctttgtagctggattttagatcaaaagaaaagatagcgttctttagtgcataaaccctgtagaactcattcattcatttgtttagcaacgatttatttagtatctttttttttttttttttttgagacagagtctcgctctgttgcccaggctggagtgcagtggcgggatctcggctcactgcaagccccgcctcccgggttcacgccattcaccgagtagctgggactacaggcgcctgccaccatgcccagctaatttttttttttggatttttagtagagatggggtttcactgtgttagccaggatggtctcgatctcctgatctcgtgatccacctgcctcggcctcccaaagtgctgggattacaggcgtgagccaccgcgcctgaccttatttatttagtatctatatttaccaagcactgtgcttygtgctgggatagggcagtacccagtccttgtctcgagcctggtttttgagaatcttggcttccttttctgtaaatgtgtgtgtgtgtgtaagtgtgtgtgtrtatatrtgtgtgtgtgtrtatagacacgtttccatgtcttttaaaatctttttgtaaatatcatttcgataatttctttagtaatatgagtgaattaaaattcacttgacaagtccctaatattagacatttagaaatgtttctttgtcaatatagatagagggggtttccaaggaaaaggtggggatacaaaagtcaaacacgactatgaaatgctgagattgaaaaaaaaatactagatatacaggagacagctatccttttccttgccctttcgacacagtaagtcaggatatagggagaaagagtcctagaaactgagtcaggaaaccttagttccaggtcacacttaataagatctaaacttgggcaaatcacttagcctctctaagcctcagcctcgaaatctgtaaagcggaattaatcatacttatcttggcagggcacagtggctcacatctgtaatcctagctctttgggaggctgaggtgggaggatcgcttgaagccaggagttcaagaccarcctgggcaacatagggagatcctgttactaccaaaaaataccaaaaaaattaggtgggtgtactggcrtacacctgtattcctactaaagtcctggaaattggagaagagtcagtcttagtaatcacccccactttcattacatgagctttctcccttcagcatcccccaagcagagaggtaggaggccagtgwcgctgagccacctctaggtgggcacccacatggtcgattgaaaccacgggctcagccgggcgtggtggctcacgcctgtaatcccagcactttgggaggccgaggcgggcggatcacgaggtcaggagatcgagaccatcctggctaacacagtgaaaccccgtctctactaaaaatayaaaaaattagccgggcgtggtggcgggcgcctgtagtyccagctactcaggaggctgaggtgggagaatggcgtgaaccccggsggcagagcctgcagtgagccgagatcgcgccactgcactctagcctcggcggcagcgagactccgtctcaaaaaaaaaaaaaaaagaaaccacgggctctcccatggaaatgtcctgattatgtccaggcttctccccctgaagtacgtggagctacgaatctacgacyggctccagcgcatcctgagggttaggacagtgaccgaaaagatctactatctgaagctccacgaaaaacacccagagattgtgtttcaattctgggtccgcttggtgaaaattctgcagaaaggcctgtccatcaccaccaaagacccgagaatcaaattcactcactgcctggtgcccaagatgcccaccaactccacagaaacaacagtaagtgggcctccytccgggacctgtcgagaaataagtatatataagtatatatgtaagtgtctgtrtatatatatagacttgtttccatgtcttttaaaagctctttgtaaatatcattttgataatttctattcaktagtatgaatgaattaaaatttatttgaccagtccctaatattaagacatttagaaatgtttctttttttttttttttttttttttgagacagagccatgccctgtcacccaggctggagtgcaatggcgcgatctcggctcactgcagcttccacctcccraattcaagcgattcttgtgcctcagcctccagagtagctgggattacaggtgtgtgccaccatgcctggctaatttttgtatttttagtagagatggggtttcaccatgttggccaagctggtcttgaactcctgtcctcaagtgatccacccaccttggcctcccaaagtgctgggattgcaggtgtgaacctctgtgcctggcctgtatttgtttattattgtaaataatgctaaaacaagcatttatatgtatgatctacatttctgattatattctcagttaggtttttagaagtagaattcaaacagcatgaacattttcaaggctcttaacacatattgccagattatttccataaatatcataccaaattatactctcaccaatcatatgagtgtctgtagtctggatgcagtggctcacgcctgtaatcctaacactttgggaggccraggcaggtggatcacctcaggtcaggagttcgagaccagcctgcccaacatggtgaaaccctgtctctactaaaaatacaaaaattagccaggcatggtggcaggcccctataatactactcaggaagctgaggcaggagaattgcttaaactcaggaagcaaaggttgcagtgagctgaaattatgccactttactccagcctgggcgaaagagtgaaactccatctcaaaaaaaaaaaaaaaarattagtatgttactgtgtatcttattacaattaagaagtaaatgttttaatgcatttcctagtataataggtaaagaagtggcatctctgattttcaatgagtttcagcattgttrcatacatatatacatatgtaacratygttacatacatatatacwtatgtaacgattgttacatacatatatacttatgtaacgattgttacatatatacktatgtaacgattgttacatatatacgtatgtaacaatcgttacattgttatgtatttgtagttatatataacacaagattgtttttatatatatatatattaatgccatatatatggcattgtctgttgtgttctttggccatttttctattggcaatcttgtgtttctctaaattgatttgtaaaattaaacttttttttttttgagatggaatctcactctgtcaccaggctagagtgcagtggtgtaatcttggctcactgaaacctccgcctcccaggttcaagcgattctcctgcctcagccttccgagtagctgggactacaagtgtgcgccaccacgcccagctaatttttgtattttcagtagagacggggtttcaccatgttggccaggatggtctcgatctcttgatctcgtgatccaaccaccttggcctcctaaagtgctgggattacaggtgtgagccactgcgcccagcctaaaataaaactttttatacattgggattttggacccttacaaatttttacaaatatttcctcaagtatttgcccttcctctttggtttatttagggtacgtctttgatacacataaggcctttccaggtcctgcttggtgtagaagcacaggaaggaaggccaatagattggactgttcaaaaccttcagatttcagaatctaaatgctttcctcctctcacttaagttctgtgcttcaagtatgttattgactctgaaggtcagcagttttacagcctgacagccctgcctctgaacgttcagatctgcactcaggacagagcagccactgcagttgaccagggagcaggtgtgaccctgccaggggtctcatttcttgttggatgattctcrggacttaatgctgaaggaacaggttcccagggttagggtgwgwaactcaactgtaatatcacaaaccccttcaaagttctaccccgaggaggccaagaactctctgagcagacctagccatctgaygctaaatttctccatccagcctgaaaacagcctcctgtcatccccccagcccagcgagcccctcgtgctgctggcggctgagcagaccagtggcagtttctcacagctctcaggaaagccccagctcacrgcagacaggtgggtcctctgtggggtcagctccagatcccttcctccagtgtgaagtcatggggtcaacgaacctatctcagttccttctttgtattctttgtattttagatagtcatgcacatggctttttctgtcaattttattgtaagcctgcctttgaaaacaaggtctttggcyctttgatctgaatattcacttcttaggcaaactccagtgttttctaatgacaggtgttcaataaaaggaatgagggatgagaaaattaattcaaagaagtgtaagctaacaaagcaggctcatggtggagttagctattgactatttccaatccaagctcacaaggatccctggggtaaaaccctagttctctttgcctcatctgcctcttcttttttagttttctttttyctttctttctttctttttttttttttttggagacagagtttcactcttgttgcccaggctggagtgcaatggcgtgatgtcagctcactgcaaactccacctcctgggttcaagygattctcttgcctcagcctcccaagtagctgggattacaggcgaccgccaccacacccggctaattttttgttatttttagtagagacagggtttcaccatgttggccaggctggtctcgaactcctgacctcaggtgatccacccaccttggcctcccaaagtgctgggattacagatgtgagccactgcgcctggtcctcaccagcctcttctgcaaaatggacagaataagggaaacaaccagtagctccaaagtctcattaatttactaataattgtattagattctttctgtaacaagtaatagaaactcaaagcaagatagtgcaaccaatatgctgcacaagtgcaacttgtagggtatcatcaaaatgcaaatttattttgtctgcccttcataactttttcagtgggagaaggtttcctcttgcccctggataaaagctggctttctgggcaggccacatagcatatgggctctctctgagaatataaaaggtcctttggtccatttaaattgcaaaagcagcctcaattctgaaattaaaatatctaatgtctgaaaactatcaaaaccctgaacttatmacatcttcttaccctcagtctggctccctatcaaggtgacctttcctaggggggaactgggttgtcactcttctctttctgtttcctaatatttaaagctaccttttttctcttaggagctttctttcttttttctttttcyttctttctctcgtttctttctttctcttttatttccccctcccctcctctcccctcccctcccctcccctctcctctcctcctttcctctgctctcctctcctttcctctcctctcctttccaacagtgtctcactctgttgcccaggctggagtgcagtgccatgatcttggctcactacagcctcaatctcctggggtcaagcaatcctcccacctcagcctcccaagtaactggggctacaggcatgcaccaccatgcctggctaattttttaaatttttagtagagacaaggtcttgctatgttgcccaggctggtctcaaactcctcagcccaagcagtcctcctaccttgacctcctaaagtgctgggattacagtcatgagccatcacagctggccaggagctttcttgggttctttgaaatctcctttctggcccctcaactgcaacacctccctttcatctggccacactgcamccctcccccacaacccccctggccatggctctgcagggaccatgctcccccaggcactagctatcccctttaaggagtcctcctgggtaaggcttacagtggctccaggctggtgtacacttgcttgctctctctcatacagtccacatctggtcctcaggaatcatcctctcatattttgaccagccattggagaggaggaccttgcttcctaggcacagaaacaactcttctcccagagtcctagagccacagctcaagccccctgggttgtccaaggaaggctctctctttcagcttaaggaaaaggagccagcaactctttacaaaggactctctccccacgtgacaacccaagcccttggttaccaaggctggcaatcccttcaggcagcccagctcactctcacttctctgatcttaaatttttagtccccgggattttgtctttgagtcataatacattatattctcaacacatcaaagcagtacttaaggtttgaagagttgtttgttcctccacagggcaggccttagctccaggctccctcctcctcctctgtggctttctctcctcgggttgcccttaacattattgcatgtgtgcatattgtcactgccccacatttccatatttctacatgtccttaaagcactggagctggaaaaaggcatgattagaaagtgagttggttttttttgttttgtgttgtyttttgagaaggagtctcactctgtcacgtaggctggaagtgrtgccatctctgctcactgcaagctccgcctcctgggttcaagcaattctcatgcctyagcctcccgagtagctggaattacaggcgtgtgccacatgcctggctaatttttgtatttttagtacagacggggtttcaccatgttggccaggctggtcttgaactcctgacctcaagtgatccgcccacctcggcctcccaaagtgctaggattacaggtgtgagccrctgcacccagctgaaagtggtttttaagttaaattttaacaatgttttctttttcttctattgctttcaataaccccaaaattccctgggctcctacaggaacaatgacactgccrttgaaatagacaactgcagcagctacaagataccctctccagtggcatctccaatcaatttgaatatacccatgagagctgccttgagccacagcctctgggaacaagaggactggaatgagcaccttctacaagttcatatagccagttacctaggagagcacttcttgggagcctgacacctaggcaaaacatgctcttccttgcatacgtgtacttgctaccacctcttataatgctccttttccactgtgagccaagtgaccttgggagaggtaagatggtgtttccaacaaggtgcttctctacttccaccaataaacttccaagtgagtccctaatttttgcagrttgggctatagggaggctccagtttgggaaaggactgactgagaacaggagcagtttttggaaaaataggtgggaaaagttactgtctgtgtgtacagagaactacctgagactgggtaattttatttatttatttatttatttatttatttatttatttattttggagatagagtcttgctctgtctccaggctggagtacagtggtgcgatcatggctcactgcaacctccacctcctgggttcaagcaattctccagcctcagcctcccaagtagctgggactacaggcacacactacacctggctaagtttttatattttagtagagatggggtttcaccacgttgcccaggctggtctccagctcctgagctcaggccatccagtcacattggcctctcaaagggttaggattacaggcgtgagccaccaggcccagcctcgagtctgggtaatttataaagaaaagaggtttaattggctcatggttccccaggctgtacaggaagcatgactggggaggcctcaggaaacttacaatcaaggcagaaggcaaaagagaagcagacctgtcctacgagtctggagcaggagaaagaaagaagtgggaggtgctatgcacttttaaacaaccaaatctcgtgagaactcactatcatgagaacagcaaggaggaaatccacccccatgatccaatcacctcccaccaggcacctcctccaacactggggattaaattcaacatgagatttgggcagggagacagatccaaatcatatatcagtctgctcagttgaaaccacacaatagccaagcaaagccaagaaagccagtccaaggctggcttggaaagggcctctgaggagaaatcaactttcaaaggggcagggggaaatagaggttgagctactgcaagcccaaaataaaagaaatcctgagaaggatggtaaccagctggaagattcctttgtgttgctccactatatcaagcaagaaattgagtctttggctgggcgcggtggctcttgcctgtaatcccagcactttgggaggctaaggtgtgcagatcacttgaggtcaggacttcgagaccagcctggccaacatggcaaagccctgtctctacccaaaatacaaaaattagctggatgtggtggtgcacacctgtagtcccagctactcaggaggttgaggcaggagaattgcttgaaccaggaggcagagcttgcagtgagctgggatcatgccactgtgctccagcctgggtgacagagccagactccatctcaaaaaaaaaaaaaaaaaaaaaaagaataaattaggtcttcattgccctgtgttagtgtaaagctatgaaggctcccctggctcatacaacatttcattgctaatgaaaacrtggtgaggaagatattgactgcccatcaccagaaattctgattaatttgactgtttcttacccagaacctaatgaaagtgaactggaagacatggcatctttgagtattgggaatggggyaggagctttggccaacctttatacacatagggaatacttacaaggaaaataccatgactcctttttttttttttttgagacagtcttgttctgttgcctaggctggagtgcagtggtgtgatctcagctcactgcaacctccacctctcaggttcaagcgattcttgtgcctcagcctcccaagtagctgggattacaggtgtgaaccaccagtccggctaatttttgtatttttagcagacacagggtttctccatgttggccaggctggttttgatctcctgacctcaggttatccaccctcctcggcctcccaaagtgctgggattacaggcatgagccaccacgcccagccccaccacgcccactccaatatttaataagtatttgtcaggctcctgctaggtgctagacactgcgtttgacgctaagtatattggagagaacaagacagacggacaagttacctgccttgagggagggtctgggagagatgccaagtcctattttggagacatagtgaagccattaatgttgacctgatgtctgagccacccagtctgcaaatgaaagctggaggccctgctttccagcatgtgtggttcacatcctatgtggtgcagaaagaaagaacatggttgccctcctcttgtgcatgctcagttgggctgagcagtcaaatctggctgaattgagtcagaaaagacatctgagttaagaggatgcctgatgcttgttggttttgtcttgcctccagtaaaattaaaaacaagtttcctttcagtatgttacaatcaaataagctgagcattgttggtgctggtgagggacatctagaagctgaacttagaaaagactaatgtgcagggtgattgtacttccaaatgcatgcctgttgtcctggtatcattattaatacatacccatttcactctgagaagtgtccctcagtgaatcacaaatcatgtggccatcctatctatatggcatacttataaacattgaaaggcttgtcatccccacttctttgtcttggtttaagccttcatcagccctcacctagactattgtattaatagtaaccccaggccaggcatggtggctcaggcctgtaatcccagcactttgggaggctgaggcgggcagatcacgaggtcagaagtttgagaccagcctggccaatatggtgaaaccccatctctactaaaaatacaaaaattagctgggcatggtggcgcacacctgtagtcccagctactcgggaggctgagacagaagaatctcttgaacctgggaggtggaggttacagtgagcagagatggcgccaccgcactccagcctgggcgacagagccagattccgtctcaaaataaaataaagtaaaatagtaaccccaattggtctcccagactttatcatcatcatcatcataatagctaacatctttagaaatttgctatcttctaagcactatgctgactttacaaagatcacataaaccacaccacaagccattgagaagtagatcttaytattacattttataaatgataaaccggagccacagagaggttcaagaacttgcttaaggtcacacaggtagtaagtagcagagccaggacttgaagccagtctgtctaactccaaaatccaaattactcttgatgcctctccaatgtcttcccaactcattcccttttcatacctctaacagagcaactttttgacacataaatctgacagaaaggaccaggcacggtggctcatacctgtaatcccagcactttggaaggccaaggtgggcagatcacttgaagtcagaagtttgagaccagcctggccaacatggtgaaaccctgtctctactaaaaatgtgaaaattagccaggtgtggtggtgcgcgtctgtagtcccagctactcaggaggctgaggcaggagaatctcttgaactggggaggcagaggttgcagtgagccgagatcactccactgcgctctagcctgggcaacagagcaagattccatctcaaaaaaaaaaaaaawatatctgactgagtttcctccttaataaaaccagaccctttgacatgaaatgactagacccctgcctctctctccagcctctccactggccactgctgccatagaatcttatgctcccaccatgccaaatttcttgtggttccctaaatgcgccatgtttgaagatactytgaggacattgtatatacttttgttctacctgagatacatttgcttactttctccacatattgccctcatgacacttatccttattgatggatttcttcaatgctactattgtgccttacatgtgccttgtattatagcatttttatagcatttctcacccaattgtgrctatttgtttacatgtctgtctccttggtggaactgtgaactctgtcataacagatgccattttatgtcagttagacttctttggttgccmgtaagagaagctgactctaatctaaaccaaaaggaattcattggacggatgtgggttggctcacaaaatcaaagggacaactgcggagccgatcttggaadgctctgacaccagaacagctctgtgaattcagataggggtagtgaattgaccatttcatcaaatgctgcagcaagctaggtggtttccccaaaggaaattgaggagtgttacaagaagaccattaggggaacggttatctggtggctgataataacaaatttccatggcagtctctttgctctctgttggaagaggtactccaccatgggccttgagcatctctacacatccttgctaagcgtgtcaaatttcaagtcctaactgtcctctgtctctggaggaggagacaggtttggttactgtttgttgtaaaaattactgagcccttcaccatgggtgcctcagctgtatgcaaagccccttgtattgctgggggacagagcaactggtactgccatgctggtgctctggctgtttgctgttggcaataaactattctgttttggttcattgaatctctgtctactttgggcacctatgtgatcatggtaaatcaacctgcttgcttgcctagtcatttttttagagtattgttaygccttgacatcctctatgagacctagattcttctcggacactgtccaaacccacatacaatctttttttttttttggagatgaagtcttgctctgtcgcccaggctggagtgcagtgatctcggctcactgcaacctccacctcccaggttcaagcaattctcctgccttagcctcccgagtagctgggattaaaggcacgygccaccacatccagctaatttttgtatttttagtagagatggggtttcactaggttggccaggatggtctcgatctcctgacctcatgatctgcccacctyggcctcccaaagtgctgggattacaggcgtgagccaccgcgcctggcccccctggtttcttccttacctttgtatcacaaaacttctaraccaaacagtaaatataaacgccacaagcataccctatgcacaaaatgagagaaggatttaatttaaataacatacatcactgcaaagaaagaaatacaggtggaagttttagttctttctgcttcttggttacaagtcagtagtagttgtcatttcttacttccctcctatactaccattccaggtacctcttgctttgactgggttcattccctggtagggagtccacaaactttcactcctgaaaatsctaagcccttgatggttttgcacatgtagagttgtgtgatcttcttttgactgggcaagagctgtaaagaggcatctcagtttcctctgagtaccattcctactcctctctgcccccattctgtagaaccatctttttgcttttaataataacggtcccccctccccctcccctccccctccccctcccccctccctctccccacagtctccctctccctctctttccaccgtctccctctgatgccgagccgaagctggactgtgctgccgccatctctgctcactgcaacctccctgyctgattctcctgcctcagcctgccgagtgcctgcgattgcaggcgcgcgccaccacgcctgactggttttcgtatttttttggtggagacggggtttcgctgtgttggccgggctggtctccagctcctaacctcgagtgatccgccagcctcagcctcccgaggtgccgggattgcagatggagtcttgttcactcagtgctcaatgttgcccaggctggagtgcagtggcgtgatctcggctcgctacaacctccacctcccagccgcctaccttggccttccaaagtgccgagattgcagcttctgcccagccgccaccccgtctgggaagtgagaagcgtctctgcctagccgcccatcgtctgggatgcsaggagcccctctgcccggctgcccagtctgggaagtgaggagcacctcttaccggccgccatcccatctaggaactgaggagcatctctgcccggccgcccatcgtctgagatgtggggagcgcctctgccccgtctgggatgtgrggagcgcctctgcccggccgtgaccccgactgggaggtgaggagcgyctctgccyggccgccccatctgagaagtgaggagcccctccgcccggcagccgccccrtctgagaagtgaggagcccctccgcccggcagccgccccgtctgagaagtgaggagcccctccgcccggcagccrccccgtctgrgaagtgaggagcccctccgcccgrcagccrccccgtctgggaagtgaggagcccctccgcccgacagccgccccgtctgggaagtgaggagcgtccccgccsgscagccaccccgtccgggagggagrtgggggtcagcccccgccggccagccrccccgtccgggagggaggtggggggtcagcccccgcccagccagccgccccgtccgggaggtggggggcacctctgcccggccgcccctactaggaagtgaggagcccctctgcccggccaccaccccgtctgggaggtgtacccaacagctcattgagaacgggccatgatgacgatggcggttttgtggaatagaaaagggggaaaggtggggaaaagttagagaaatcagattgttgctgtgtctgtgyagaaagaagtagacatgggagacttcattttgttctgtactaagaaaaattcttctgccttgggatgctgttgatctatgaccttacccccaaccccatgctctctgaaacatgtgctgtgtccactcagggttaaatggattaagggcagtgcaagatgtgctttgttaaacagatgcttgaaggcagcatgctcgttaagagtcatcaccactccctaatctcaagtactcagggacacaaacactgcggaaggccgcagggtcctctgcctaggaaaaccagacctttgttcacttgtttatctgctgaccttccctctactattgtcctatgaccctgccaaatccccctctgtgagaaacacccaagaatgatcaataaaaataaataataataataataataataacggtcaatccactctaacaactccaaaacccccttctacacataacaccatgctctcctaatggtaggaggagacaaaaatggcagccgcagttcagttttcagttggtggaatgatttttgtgcacctggtgaaatcactttcacccttaggtattaaaatctccaaacttcatacatgcaattaaaaattattttttatttttwaaaaatctttttccacatgttctatgcaatttttcatacaactcttccttaagaaactcctagaggatgtacgcaattaaaatgaagtcaactcagaaaaacacggctccaggaaagtggtgggttcaatgtaggaaaaaagtgaaggcaatatccaggtgaagagagatgaagagagagtccagaatgacaggagaacagcagccccagaaagcagtcagctcttactggagcaggagagaggactctgctaaatacatctccgcaaagatcaaattgatggaatacctgatgtgtttgaatgcactgagagacttacgcttatggcaaagtttaggggtgtgttaggaataggactattaagccaagcaaacaaaaaataatataaatattaactcygagaggaagaagttgtacaaaaaaagaaatataattcaagtatgtactatatctttgactattcataatactgtacacatcgaatatagattgaatcaaagcagaggatggttgaagctcaatttgggggatgggggaaaggggaagggaaaaaaggtgaagattaaacccttcccttccatggctggaagttctgtgccccagaattcccttggttcctgcatgttctccaagctgwtctacatctaagagctcatcacgtctggtttccaggtgggtttggccagtgggaaacccaggcaggagatcagagaggatgargagaatggggtcaggacaactatttcctcccttgtggtgacataaggtaggctgttaacagagggaaactgtcagaagtatttgaaccagagcaactccatcttgaatgggggctgggtaaaataaggctgagacctactgggctccattcctaggaggctaggcattcttagtcaaaggatgagataagaggttggcacaagatacaggtcacaaagacaccactggccaagacccaccaacactaagatggtgataaaagggacctctgktcgtccccactgctcattatatgctcattataatgcattagcatgcgaaagggctgctattctctaataaacttgctttcactttatggactgaccctgagttcttcttgtaccaggtccaaraaccctctcttggggtctggatcgggacccctttccggtaacaaaactgctcctctcgtggtggcttcctctactagactctcctgtatccagtaaccactccctcccttcatccttcagatccctggtatggacttagctagcttgatgcccccttcctgaattgtgtaacgtgagcaggaacatcactcatctccatgcaggcgttgtcgcagtggggccaccatcctggccaggcagtcccggccatgagacagtcgctgggcttccctccagcttactgctttttggttctggcctattctccatgcctggttcttttaaccttcagttggtatgaagagctccccaatagtcttccaataaattcccttcggcttgggttggctgcatgtttyctacgtgtacacccatgaagtctaattgatgtggttctgtrcccagaaacatggaagctgcgtagggaaacgtgccagccatatgtgtgtacctgccagtgcctgggtcctactagactgacccagttaaagtgtctatttcttgttaaataaatccctttctgccatagccagctgtggctgctccacattgtttctccttcaaaatgagggaagaaacaacagcccttgctgamtgggctcatccttgaagttgatttctcagaatctatttcttagatgaaaacaccacacggattggtgaaatttctaatggccaatacacacaccatttaaaagagaaaagaaacaaaacattgttatccggagttaattatgctccaccaggacatggcatctgcaaaaacaatccccaagacaatgtaaaaatgcatcttaaagtttctgacatggaattcagagaaaagagaaaatgtcctcaaggaataacacccaaatggaccctcttaaaagatgtggtggaaattatatggaagcttcataaatgcctttgtaagtcttgagaaaaataagcagcgggttaattagggctttactgttgtaggtgaggcagccggcagggaagcagagaagctgggagcatgaatgtatagaaacgcgtggttctgggttcattagtgacctcccagaaacacaggtcatcaatttagagaaaacaaaacacaaggggctcatctcgagaaatccaagaccatggcttcaaaagtggttccaatcactgagagtggtaa

SEQ ID NO: 1600 - DNA, 29958 bp, Homo sapiens
tccaagaaagccagagataagtggctagtccgcctaccctaaaaagccaatctagtagccagtagtagctagcagactaaaaaggttttgagttccaccccagacataagatagatatagccctgggtcctaaattccacacatacccagatggctcagatatcagctccaccataccttgattccagaatcccaaagctctgcaataagcttcaaccgttcttggagaaagttcttctgtggtgtggccacaaacacttgagtctctgtagtccgcaccttctcacctttggtctaataagagagaagaaagtaaaactaataaaaacctcctttccaccagcaattccaaaaatcaagacaaaaagaatcatcagaaaaccactccaactacacctccagaaacaggagggtttttaggtctccagccccacctcacacctatctaggacctaccttcatcctctgctccacaatgtagaagattcgctcaaccccaatgctgagtcccacacatggcaccttgtggcccttggggtcaaacatgcscaccagcccatcatagcgcccaccagcagccacactgcccacattcaggggctcctccccagcctgagttggggtctgcagcagcactgcttcatagatcactcctgtatagtagtctaggccccgagccaggctgaggtcaaaggagatctgtggggacaagattacagtcagtcccaaactagactcgggaccctgagagccctagagctcagcaggaggtccatttgcaattcagcttaccttatcagcaattccaaataaagtcaggtattcaaatagcagctttaggtctcccaggccctccagggcctgcttgttctgggatagtctgggatcctgaaacatttgctctactagggataccccacctggagagaaataaagtctctgctgttcactcacatgtgtttcattcaaaattatccctaatgtgctctagctagtcttcctcattttctttaaaaaaaaaaaaaaaaaaaaargatcccagtctcacatgacaagaccctcctcctttgcctctagctttgccatctgaagacacaaagtcgttacaataagtaaaagagaaattaaattcaggacaggccctggagcttagcatatctacagaaaagagttgtttcagaggtagaatttgagcacatgtcaccttcagcctggttctatcacagctctgaaaaccctggttcttaccatgacactggacatagtccccaattcgatcagccacctcaggagccaggcctttcttcaccaccatctcatgtctcacatctttccaagccatctgcataaacacccaaacattagcccagccccaagatctttctttctcaaactgmaaaaggacaactcaacttccattcagtatatacatcacaagtagctaactgtatactcagcaaagtcagagacagcttaagaaatccagtcacaatccccactgtatagcatgactcagatcttccttcagagtatgcctccttaccttccaccccaaaatagcccacttccagccacaatctccttatttttcactagtggtatggatttgagggcagggcagaagctagatagggtctactgaagtatgtcttctttgttaccttgtctagtttatctatggaggagcagatggcacggaacttgctttcaggaacaccacagacagcaaacatcccatccacaatccgccggtcatttacctgagaactcaatgtcagtgacccaagtgcttgtcaatgcccttccactcaaaacaatggcagtacctactttcctgacacacaaaaaggatggaaatttcacaggaagagtacagacatataggaaatacaacagctttactaggaaagtcctacagttgcaggcttaagggttggagtcacccaagtttgggacttgcataaacagtattargccaaatccagacttctcccacagttctcagccctggcctcaccttaatgagaaagtctcccaactgcaatccacttaggatttcacacatgatcttcaaacactctgcatcggggatcatagggtcaaactgaccagcaatgtcaaaatcctacagcaaagaaaaagatgggaaaaaacatccattatccagccagtttcaaggttgtggcccctagaactatcaaactgtgctgctcccatcaggtcacttacacactggcagaactccctataacggccttggactatggttgggctctctcgccgccacacctttccaacatgataacgtttcatcttcttcaccttattcatggccagataacgagcaaagggaacctcacataaatgggttaaggaagagggatactgcatccaaagattaggcccagtatacagacattagggaggactgggcctggatctcatccactagggtaagaacaaggaccttcccttttttccactatccccaaggcctagcagtgcttggaattcaatatatattgaatagtgtcaaatgaaggaatctcacctagcaaaactaaaagttcagcagaaagcaaggcaagtagagatagaagtgacccaagaactaacttcaggtctttctgcccattcagatcgattccgaaccatctcaaaatagtcaagcttcagaacttggatttgcctaacaacttctaagctactggttctgaaagtgcagggaaaggactacatgcatcttaattacccacgatgcttgtttaaaatgcagactgtaggccagatgcagtggctcacacccgtaaccccagcactttaggaggccaagatgggaggatcacttgaaacgatgagtttacaaccagcctgggcaacaaagacacccatctccacaaaaaaaattttttttttgagacagagttttgctcttgtcacccaggctggagtgcaatggcgcaatctcggctcactgcaacctctgcctcctgggttcaagtgattctcctgcctcagcctccctagtagctgggattacaggcacctgccaccacagccagctaactttttacgtcaaaagagatctgtggagacaaggtgacagtcagtcccaaactagactcagaacctgagagccccagagctcagcaggagctgagtagagatggggtttcactatattggccaggctggtcttgaactcctgacctcaggtgatccacctgcctcagcctcccaaagggcttggattacaggcgtgagccacgtgtctggccaaaaaaaacaattttttaatacaaattattgagccccattccagctacagaattagctaagaatctctgggactgcagccaaatgtctgtgcttctgcaagctcccccaaaggattatgatacacactagagttaaatgacagggctccaggccaggcttccgtagcagaactgccttctgggagaaactagaagtataggcaatggacctctaagatcccaaagtcacgttctccacttttgtcagagaaagcccgctggatttggaaagagacaggtcaggctcyagtactcaaaaggatacagtaaggtcatagcggagggacaacagctctccaccttgatccttcagatcatacatgagcccagagtcctctccatacttctcagtcagggtttcctatagggstcaaacagaatgagcsacagttgaaagcatgactccaaaacacagatgagaagccctttgggacactgaacgccattgaagaagtgartgaggttgcacgtactctttcttctccccttaccttcagctcaaatgctggggtgtccatcccctttgctccatgacgtttaaagcagctgataaccaaatcaagaattttctccctcacaaccatatgctgaggactaagatccctggtaccctggaaaccaaaagcagccatagtgaaaacaaaaacaaaamataagtccatttcagacaaggagttaaactacacttattatgtaatctcaggtctggagctgaaatctactgagttcaaatgactctgagccgcacctagtatctcaagaatagtatatatttttaaaatttactgtaaagaacattaaaaggggtcagagagacatgcaaggcagaggtcagtcctccaaggcactctaatgggatagggtaggcaaaaagtattacctttggggtcttgataataaaatttggtttctcttgatgtgctttcagttgggatgttaacactgcctctgcaacctggcagaagaatgaatgtgagatgtggcttctctggacactggccagacctgtggcatctctgaccctgttgaccaccaacctgcaaagactcttcaccctgagcaacaggaagccaaagcaccatttcatctatcccaatctcagtcccaccccaaagaatctatgttgtatttacaattacacgtgtaatatatatgaggtcaggtcttcaccacacaagcttcctcactgtatatggatttttttttttttttttgagacagagtctcggtctgttgcccaggctggagtacagtggcacaatcacggctcactgcaatctctgcctcctggttcaagcaattctcctgccttagcctcccgagtagctgggactacaggcgcgccaccaccacgcccagctaatttttgtatttttagtagagatggggtttcaccatgttggccaggctgctcttgaactcctgacctcgtgatccaaccgcttcagcctcccaaagtgctgggattacagacatgagccacmgagctcagccgcatttttaatattctcaaatactttaagaatctgagaataatgaaggcactgaacaacccaccactaccaacaccaaccattcaggggtagggattatggtgatcttctccaggtcaccgttcctactgaaagagcaaaaataatttttttttttttttcagatagagtcttactctgtcgcccaggctggagtgcagtggcacgatctcagctcctgcaacctccrcctcccgggttcaagcrattctcctgtctctgcctcccgagtagctgggattacaggcacatgccaccacgcccggctaatttttgtatttttagtagatacggggtttcgccatayaggtcaggctggtctcaaactcctgacctcaggtgatccaccmcccttggcctcccaaagtgatgggattacaggcatgagccactgtgcccggacaaaaaaataataatttttaataaggtagcactggttatcaggtttagagagaggaaaactgtaacttgaagacaagggaaccagctcaaggacacagaacaagcctgtggaatgataagatatggatttcttgaatgarctaaaaaactcagactgataagatgctgtgattgaatatcaataaaagatctgtgccctattgttcacgatagcacaaagcatctgytaagagagcattagaatctttccgaagtaaggcaaaacttaatcagtgacattaccagcacgctgtatgcccttccaaaaatagagratgtggtggttccatactatggcgattatctgccctaagagaagtccaagttcaagtacacaatcccttatctgcaattccaaaatccaaaactctctgacatctgaaaatgtttttctgagattcattttgaggtaaattctaagaygaactcagtctacttctgatctttagtcatctcatttactaggaatattcatatatttcgcttaaaaatgttactgtttgagtccaagagtttcaggaaaaagtgtggatatgaattaaaatactcccttactacatatccgtgtataagtcattcatttaatcttgcagcctccgtttcctcaactgcagaatggaaatcaaaactccaacctctcaagattgctccaaggattaaatgaccaggcatccaaatcgcttagttcagtgtcagtacatagtgggcactcgataaaaaccgattgtaacactactggaatacaggccgcgaggctatgcgttcagatctggagaccctgctgggacagaccagagataattctgtctcgctcacctggctttggcaacggaccgccccggtgcacgaagcgcagggcggtcgcaggagctggctgagcagcgaagcccaggccctcctgggaagaagtccgagcaggggcatcgcgcggcaggacgccggctttccgggacaggaacaaaaggcctgggaaggaggcgggtcagacaccaggaagggtggagggcactgcaaaggcggaacccgcgcaccagggaaaactcgggcgtttgcgcacctcactagtcacgaaggctgaggtgggatcctcccaagttcccttagtagccagcttcggcacttccgggaggagccggaaataatttttgtgctcggcggaggctctctaggcgtgcgacccagcgactcgatagccggaagtcatccttgctgaggctggggcaaccaccgcaggtcgagacagcaggcggctcaagtggacagccgggatggcagagcgtgcggcgctggaggagctggtgaaacttcagggagagcgcgtgcgaggcctcaagcagcagaaggccagcgccgagctggtgagatttaggcagcaggggagagggccaaggcaaagcctgggaggacgtaaagccagggtgttcgggacatagggtagrgatgtgagggaagcgaccagtcttgtagggaggagagtgggctgcgtggggagacatccggggtgggtcccgagagaaacaaagctaggcctgagcagagagatgtgatgagggaggaatattgaatgaatggcgggggagggaggagagtgacagatggatagctcagcgcmttctttccctccacagatcgaggaggaggtggcgaaactcctgaaactgaaggcacagctgggtcctgatgaaagcaaacagaaatttgtgctcaaaacccccaaggtaatatcattcctgtagggagccactgagaaagtctctaactctactcacggggcgcttatgtctgcctccctaaaccagstcattgaggaggatctgaaatgctgcagaggagaggacagtcgctctgggcgctgggctggactggactctacctgagtcattctgggatggcaaagtgatggcagaaactaggccagctgggtgatcaggggagtcagcctgctgctgctactccttcgttcattcaataaatgtgtatttagcgctatgtctctagcactatacaaagcactgaatatataccatggtggacaatatagcctaccctcatggagcttacattctactgaaggagagagacttagaacaaataatcccacacagatttttttgttttttttttaaacrgagtatcctctrttgcacaggctggagtgcagtggcacatcttggctcactgcagccgctgcctcctgggttcaagcgattcycctgcttcagcctcctgagtagctgggactacaggtgcccaccaccatgcccagctaatttttgtatttttagtagagacggggtttcaccatattggccagratggtcttgaacttctgacctcaagtgatctgcccgcctcagtctcccaaagtgctgggattacagacgtgtgccaccgcacccggccaccacatgtggttatgtaattacatattgtgaaaaatgatataaagaaattaaggttgctctgagaaaaataagggagaactggggagtctgagaaaggctaactgaggaagtgatatactaactgatctaatgaatgagtaggagatagccagaggacaagtgtgacaaagataggtccaggtagagtatggaaaccctaaagtgggaaagaactttggtagttttgaggaactagaggatgatctacatggctagaactaagttaaggagagtagagtggaatgaggttggagattctgagctcatcctccagttcagttccactttctgtaagttctataaacagaactgtttaccccttcatctaggtgctcttggcacttcatacatatttgttattacaccaactttaagtagttatttatgtcgtttatttaccctgagactgagactagatgcctaaataggtatagtcagccctccatatcccaaggtcccacattcacagattcaaccaactgtggatcaaaaccattcaggggaaaagaaacgattaagaaaaaaaatctggctgagtgtggtggcttacacctgtaatcccagcactttgggaggccacaaggggaggatcatttgagcccaggagcttgagaccagcctgagcaacatagtgagtccctatctctaaaaacaaacaaacaaataaaaaccttttgaaatctaacaataaaaatttcaaataaaaaatatagtatagcaactatttacatagcctttacattgtctaaggcattataaacactctagagactatttaaagtatataggaggatgtgcatataattttatgtcaagggcttgagcatccatggatttttggtatycacatggggcccagaacaaatctcctgtggatactgagggatgattctatttaatacatgtatttgaaattgaattccaaaggagaggggagatggtctgttttccttgwgttaaggttaattctttgggatcctaaattcattgagctgtttctttctacatataactaatttttgaaggttaaagagacagtgtaaaatcccaaagtggtgatcatcaatgatttttcaaactattagatgaaaagcttactgtggaatttatgatggatcagtctgtcctcactagtgatcagttttaacatcactaaaagtaggacarctagacattatgttcctgctgatgtgatgcaagaagaagtacacagcaccacctgggaagtattcttgccaagtaaattgaacttgaatctaatcagatctttggactaactatcagtttacaggaaatactagagatggaggaacatgttagatggcacatcaagcatattgttcaccaaatctagaatgtgaaaatttttttttaggacaaatggcccaatttcctcagttaataaatgacctttttaaaataaaaaaaaaaagttggggagggaaggaaactattgtagattaaatagacatatcagctgattacaacgcatagacttcattctgaagctgattcaaataaatcaaccataaaaagatattattgaggcaactggggaaaactgaccatggcttagcattagataatattaaggagttgctgttasttttgttagttataataaagatagagtctttggggttttttaaatgtccgtatgagttagagattcatactgaagtatttatggatgaaatgatatgacgtctgggatttatttaaaaatatgtaagaaaaacatgtcagggcttaaatgaaataagaatagcagatgttaatggttgttgaagctgggtaatggataaatggtgacctgtaatactattctctatattgtgtctttgaaaatttccatactatagtgttaagattatgctagagagttaatatccattttagtattaacaatagaaaactcagtattgtggggacaagrctctttcaagggatcttcatggtcaaaactatttctataataattcttttgttttgttttgttttgttttgttttgttttgttttgtttgagacggagtcttgctctgtcgcccaggctggagtgcagtggcgtgatctcagctcactgcaacctccgcctcccgggttcaagcgattgtcctgcctcagccttccgagtagctgggactacagggatgtgccaccgcacctagctaattttttgtatttttagtacagatggggtttcaccgtgttggctgcgctggtcttgaattcctggcctcaagtgatcctcccacctcggcctcctaaagtgctgggattacaggcgtgagccactgcgcctggcccttctataataattctaagacattatctgcctttttcgttgtgttaacatttgcactgaaggcacaaaagcgctggtgagtagaactgctggtgccttakcatacattaagacagtgacactaaactgtactaatagccagtgtgttcttcactgccatgcactcacagtaagtaaataaataaatwaattaattaattaatttaaaaaattcagttttacttaactatgtcattgataaaatggtaaaactttgtttgttttggggtttctttggagacagaatctcactctgttgcccaggctggagttcagtgtcacgatcttggctcactgcagcctccacttcccgggttcaagcaattattgtgcctcagcctcctgagtatctgggattacaggcgggtaccaccacatgcagctaattttttgtatttttacagaaatacaaaaaacatacaagaaacctacaacatgtttcaccatgttgmccaggctggtttggaactcttgagctcaggcaatctgcccaccttggcctcccaaagtgctaggctgagccaccatgcctggccaaaaacttactgattttattgaatcttgacccttgaggaccctatttttaaatatttgctatgacaaaatgggaagtacacataaagcacttctgcacgccaaggtagggaaaatgcttatgccattgttcaagttgcaagctgatctagctacttttttcatagaacatcttgttttatttgaattaacaactgaaagataaattatggtttttcaaacttaaatatttggcagacatttttacaacaataaacgaagtgagcctcgtcacctcaaggaaaacatctgacagtacttgtaggcagtgaaaaaattcaagtattcaggtgamagttagaattttagaaaacttaktcagggcatggtggctcaagcctataatcccagcactttgggagaccaaggcgggcrgatcacctgaggtcgggagtttgagaccaacctgaccaacatagagaaaccccatctctactaaaaattagctgggcgtggtggcgcatgcttgtaatgccagctactagggargctaaggcacaagaatcgcttgaacctgggaagcaraggttgtggtgagccgagatcgcgtcattgcactccagcctaggcaacgagtgaaactacatctcaaaaaaaaaaaaaaaagaattttagaaaacttgcatcttccatcataagcttgacagcttcccaataattaaagagttttctactgggtgtggtggcttacgcctgtaatcccagcactttgagagaccaaggtgggcggatcacctgaggtcgggagtttgagaccagcctagccaacatggtgaaacgctgtctctactaaaaataaaaatttagccaggtatggtagctcacgtctgtaatcccagctccttgggaggctgaggcaggagaatcgtttgaacctgggaggtggaggttgcagtgagccgagaacacgccactgtactccagcctgggtgacagagtgagactccatctcaaaaacaaacaaacaaataaaaacaggccaggcaaggtggctcatgcctgtaatccaagcactttgggaagcagaggcaagtggatcatgaggtcaggagatcaagaccatcctggctaacatggtggaaccccgtctctactaaaaatacaaaaaatttgccgggcgtggtggcacgcgcctgtatgtagtcccagttactcaggaggctgaggcaggagaattatttgaacctgggaggtggaggttgcagtgagccgagatcacaccactgcacttcagcctgggtgacagagcgagactccatctcaaaaaaaaaaaaaaaagactttcttgatgagatctgaagtgatgtaaataaataaggcttcctgatattgtataatgaaatgtatcaacatttgaaagacctgttatgaaatcatgcacaggcaaaggatccattcattcaaagtacaaaatacagtagtggatttttttttgtaggaaaatatacgtaacataaaatttaccattttaatgattttttttttttttttgagacagagtctcactctgtcaccaggctggagtgcagtggcatgaccttggctcactgcagcctccacctcctgggttcaagcaattctcctgcctcagcstcccaggtagctgggactacaggtgtgtgccaccacgcccagctaatttttgtattttttagtagagatggggtttcaccatgttggccaggatagtctcgatctcttgaccccgtgatccacctgccttggcctcccaaagtgctgggattacaggtgtgagccaccacgcccagcccattttaatgatttttaagtgtacagttcagtaacatgaagtacattcatactcataaccatcaccattatccacctccagaattttttcatcatccccaattgaaactctgtacccattaaacaataactccccacttcaccctccctccagcccctggtaactgctatcctactttctactttctgtctctatggatttgactattctaggtactagataagtgagagactaattgttctttttttttttttttaagttcattgatctagctttcaaattccacattgcaaccaatctttaagaaacaaccacttgttggattctgatgtagtaccaaagaaaaatatccacagttagctgaaaagtttgttaaaatactcttccttttacaactacatatctgtgtaaggttagattttcgttatatacttcaaccagcacgacatatcacgacagattgaatgcaaaaatcacatatgagaatcctgctgtcttctattcagtcagacattaaagatttgcaaagatgtaaatcagtgccactcttctcactaaattgttttggaaaacagttacctttttctaaaatattatttgcgttaacatataatagatatattatttgtgttaacatatgttatttgttaaatgaataaatattttaaaatttttgccgttctaattctaatacagtaaatattgataggtataatccactttggggtcttgaatacatagtaagagtgtaaagaggtcctgaaaccaaagactttggagtagggtataaaagcccagattggaagctctgacctggaaggacaacacagttctagtcctgactgccacgaacatgctgaatggccttaagaaatgacttaacttctcaacatcctgtacttcatctgtaaaatttatctgcctagcctatgtcatagagttgttaccagaaacaaattagagaacaaacagttgtaactaagatttaaaagaaaagttatattgggagagaaacgttgcttataaaatttggaattcaattagttgagccagtttgagttggttatattgcctataatcatgtaggtatttttttgttgttattatttttgtttgtttggttgggtttgtttttgtttttgtttttgttttgacagagtcttgctctgtctcccaggctggagtgcagtggcactatctcagctcactgcaagctccacctgccgggttcacgccattctcctgcctcagcctcccaagtagctgggactacaggcacctgccaccacgcccggctaatttttttgtatttttagtagagacggggtttcacagtgttcgccaggatggtcttgatctcctgacttcgtgatcckcccgcctcggcctccccaagtgctggcattacaggtgtgagccaccgcgcccggctggttggtttgttttgtttttgagacagagtctcgctctgtctctcagtctggagtgcagtggtgcaatcttggctcactgcaacctccgcctcccaggttcaagtgattctccctgccttgagcctcctgagtagctgggattacaggcacctgccaccaccatttgtttgttttattgagacagtctcactctgttgcccaggctggagtgcagtggcacaatctcggctcactgcaacctccacctcccaggttcaaggatcctcatgcatcagcctcccaagtagctgggactacaaggggcgtgtcgtcgcacccggctaatttctgtatttttagtagagacgaggtttcaccatgttggccaggctggtctcgaacccctgacctcaggcaatccatctgccttggcctcccgaagtgctgggattacaggcgtgagccactgtgcctggcctcaggtaggtgtttgttattaggccaggaaatgttctgttatcygagagagagtgtttagaaaaatggcttaaagaaaagagttctaagaattttagaaaatagacccaaacttaaaagggaatggagtttggaaggcagatagcaaatgggtgtgggaattaatagggaattatttgtacttgttttaaaactcagtggcctgtaggaaaatctgtttagagcaggatttgctttttcattattgaggtcatccttttatatttccaaaacatattgttcttggttttcaaacctcatttctggttctctggctgatttcaactccaagggcacaagagactatagtccccggcagatggcagttcgcgagaaggtgtttgacgtaatcatccgttgcttcaagcgccacggtgcagaagtcattgatacacctgtatttgaactaaaggtgaggaatgggcaagaagaaactacatggtagatgagtgggcatttgaataacaaagaagatgacaacaagagagtgagggtccaaagggcccactcctgttgtggacacagaccagtctttgctccaataagaagrgggacaagaatggcttggagggagaggccctgtcttttattatcttggttgtggccagcagattccaaaagagagccattctttggaatggtaattgttctgggtcctctctacattgtattgcgtggcatctgtacttggaatgttttctagattcatgcaaaccatacgtacataaatatgcaaccactctcctattgatggactctgaagttgttagtagttctttgctattaaaaactagattgcaactgggcacatctgtagttcctgcttctcaggaggctgaagcagaaagatcactggatccgaggagttcaaggctgtagtgtgctatgatggtgcctgtgaatagccaccatactccagtctgggcaatgtagcaagcccctgtctctaaaacaaaccagccaacccagattgcattactacctgcttcaaacccagtgattcccactgcacttatagtacaacccaaactctttactcaggtttacagagccctaggtgatctggccactgcctctcctacctcatctcatgctatttttcctcttgcccactatgctactctggtcttcttcctactcttggaacatagtcagtgtgtttgtacctccacacctttgttcttgctcttcccctttcctgaactccctttccttagctctttgcatgatttatttcagattatactagagactgcagattttaattcctttttaaaaaaaaaaaatacaaatagagacagaggtcttgctatgttgcccaggctgcttgcgaacgaacccctggcctcaagtggtcctccttcctcagcctcccaaagtgctgacattacaggcatgagccaccacgtccagccagccagattttaatttcagagctcagctaaaatgccactcctcaagtaatcttctccaactaccttctttaaagtagctgttctctctcttatcacaatgagctagtttattgcctttaggctataaaactgtctgaaattatctgttgtttccttcatcaatgtctctttttattgatatttaattgtacatatttatgagactgtttttacctactgtattagtttgctagggctaccataacaaagtaccatagactaggtagtctaaacaacagaaatttattttctcacagttccagaggctggaagttgacataacatgttggcaggcctagttctttctgaaggccataaggaaggatctgttccaggcctctctccatggcttgtagatggccatcatctccctttgttttttttttaattgagacagagtctcgctctgttgcctgggctggagtgcagtggcaccatctcatctcactgcaactccacctcccaggttcaagcgattctcctgcctcagtctcctaagtagctgggattacaacacgtgtgccaccacacctggctaatttttctatttttagtagagacgaggtttcaccatgttgaccaggttggtggtcttgaattcctggcctccagtgattcgcccaccccagcctcccaaagtgctggaattacaggcatgagccaccgcgcccagcctccctttgtctttacatcgtcttccctctgtccctatctaaattttctcttcttacaacaacatattggatcagagcccaacttggagacctcatgttagcttaatcatctctttaaagaccctatcaccaaatgtagacatgttcagaggttactgggagttaggacttaaacaaatgaattggggagggtggggccagggggacacagttcagcccgtaacactagtgtgttactgtttctgatactgcatactgggaagtttcaggctttttaatctttgccaacctggtaagtgaaatatgctattaccgatgatagacatcacagggcaaggactgctgtaatgcccttaagacattccccagtttttacttttgacattattcgaatctcaggcatcaaaaaacatttatgtttrttggtctgataacctattcctagtagtttatcatcaagaaaaatacttttttttaaaaaaaaaaagagctatatacctaaatattagatattgaaatgttatggggaatttttttttttttgagacagagtttcactctcgtcacccaggctggagtgcaatggtgcgatctctgctcactgcaccctctgcctcccgggttcaagcgattctcctgcctaagcctccgaatagctgggattagatgcctaccagctcccccagctaattttgtatttttagtagagacagggtttcaccatgttggccaggctggtcacgaactcctgacctcaggtgatccatccgccttggcctcccaaagtgctgggattacaggcgtgagccgctatgcctggcctaaaaaaatttttttttaaattagaataacctaaacacctaacagtataacatgagggaggaagtaagtacagagcttcttctcactggaatttatgcatcttttaaaaacacttcaggccgggcgctgtggctcgcacttgtaatcccagtactttgggaggctgaagcgggcagatcacgaggtcaagagatcgagactatcctggccaacatggtgaaaccctgtctctactaaaaatacaaaacttagccgggcatggtggcacccgcctgtagtcgcagccactctggaggctgaggcaggagaatctcttgaaccccggagtcagaggttgcagtgagccgagatcacgccactgcactccagcctggtgacagagcgagactccatttcaaaaaaaaaaaacaaacttcatgctgagaagtctgaagaaaaaaaagatttttaagaggaaaatgtgtaagaaaaatacttcagctctgttacaaaatcaaaatagaaaaaaacacaaaattggtgtttccttttaatgataactacatcagacacctaagaattgggataaagagcagagggaaatgtagacaagttggaatcagtcatgtttgttttcaaaacttccttttaaattgttatgtttattattatgaccacatttatttatgttttctccaggaaacactgatgggaaagtatggggaagactccaagcttatctatgacctgaaggaycagggcggggagctcctgtcccttcgctatgacctcactgtatctttctaaacttgggctcttgagactttggatggattggcactcacttggctcaggtttaagaatggtagagtaggtaggatcaaatatgaggcctttggcgattaggggaattatttctctaaaccaggagtggaactttggctaaacagagcatacacatccttagaaatcttctgaatcctgagtgagacctcagcttgatgtcagggcccagttccaactctacagtcatcccctggctccagaatacctctcccctgccctgtccagtgaacaaaattcttcttaatggactagcaacacatttcccttgtctccaagctacacagagaatcatctgcttagaaatcccatatgggggcctttttctggtcgcctttttctggtctgtggccaacctgcccagccccttgccatgctcaaaaaagtccagtcaacactacaaaagggaaaggtgccttaatcttttttgarccttcagctacctcatgtggtagcacagctgatgctttctgatgtttgtaagtgctattaatcttatgggtggcagttttacccacatagggaggggttagaccccagcttctgttggtgatgataatcaacttgcagacagtgataggaggggctttctccttaactctttgtcatcaggttccttttgctcggtatttggcaatgaataaactgaccaacattaaacgctaccacatagcaaaggtatatcggcgggataacccagccatgacccgwggccgataccgggaattctaccagtgtgtgagtgttgggaaaccgtggggcaggatgagttacttggggctctctcaagccagcagaatctattgagtactcacggtgtcctgagcaaattggatgacccagataatgctcttagggtttctatggtggtttttttgtttgttttttgtttttttgagacggagtctcgctctgttgcccaagctggagtgcagtggtgcagtcttggctcactgcaacctctgcctcctgggttcaaacgattcttctgcctcagccacctgagtagctgggattacaggcgcctgccactatgcccggctaattttttgtatttttagtagagacggggttttaccatgttggccaggctggtctcgaactcctggtctcatgatccgcctgcctcggcctcccaaagtgctgggattacaggcgtgagccaccgcacccagcctcttctatggtgttttcatgcagatttcacaaaatccctgtggtgggggaggagaataaagtctcttcattttacatatgagtaaacttgatacccagcccatgaagagatcatagggataagaaaggcaaagtcaggactagaactcttggtccagtgctctttattttaaaccacagtgataggatcacagcagagaataaggaaattagctttgatacatcaaatcatccagactgatgccagggcttctggatgaatagggaaaatggctaagcactaaagccatataatcaccccatccagtaggaggagttaagaagatgatgaagtagaaaatgaaggaatagcccagtagatggaaaggaaaccaaaactggtgagaagcccaaagatgccggggtttacctctgggctgatgatcagaaaatgaaagagaaattctatgcttgagtgcaaccaggccttcctagaggacagagctcccagagtccccccttcagaaaggtgaatccctgaagaccgctggctaaccctctccctgcaggattttgacattgctgggaactttgatcccatgatccctgatgcagagtgcctgaagatcatgtgygagatcctgagttcacttcagataggcgacttcctggtcaaggtcagagctgacaaggctgggagggcaaagttgggcctggcctctcayaagagaagatccttgtgcagagggaccagtagcctaagtgaccatgactattgcaggtcatgtaagaaaagagattcccccctcactatgcattggttccttgcaggtaaacgatcgacgcattctagatgggatgtttgctrtctgtggtgtttctgayagcaagttccgtaccatctgctcctcagtagacaagctggacaaggtaacaacccaagtacttgacttyttttcccagatcccaccctgccttgggaaatggaaaacaagattgagagagagagaggtgcatgcctctatacccaccagaggaaggttagccccaggatgtaggctcatgggcagctactgctctaaaacggttccccgaggacagtacacacttgctctgtggtgcggaagctgcccaggggtccctgactggtgtctgtctgcctaggtgtcctgggaagaggtgaagaatgagatggtgggagagaagggccttgcaccwgaggtggctgaycgcattggggactatgtccagcaacatggtgaggaacagaaccaagcctccccagcagccgtcccactgccctcagtcctaaagttgaaactgttctgtgttatgtatgtaggggagtgagtgtgtctatgcatatgtacacacacatgcatgggcgactagagkccaggcaagaaggtcaaccctccttaccttttttgtttccttgtcagcctcactcacaagtctgtctccccaggtggggtatccctggtggaacagctgstccaggatcctaaactatcccaaaacaagcaggccttggagggcytgggagacctgaagttgctctttgagtacctgaccctatttggcattgatgacaaagtgagtcaagttggggacrggatcccttctgagctctggggcttcaggtccctgatcttaatctggcactgaccattttcttatctccacagatctcctttgacctgagccttgctcgagggctggattactacactggggtgatctatgaggcagtgctgctacagaccccagcccaggcaggggaagagcccctgggtgtgggcagtgtggctgctggaggacgctatgatgggctagtgggcatgttcgaccccaaagggcgcaaggtgccatgtgtggggctcagcattggggtggagcggattttctccatcgtggaacagagactagaggtaggtcctaggaggtaggtagaagatagtctgagcaggtggtggcacctaagctatctgatctccaagggagcaagtggtgctgctttgggcagggagcatctcacagaaatggagaaaagattattgctctttttcacagatttctaccccattatatgtaagttttatggatctttaatccataatctttctgcactcaatcctctgctctgggtctctacttccttcagggctgtcacaaacctgggctggtgtatccaagacttagatcttcctcatgatacggaatacttaacattttactgccttgtgccaggcactgtgcttggtgcttttcatgcattatcaaaatataattgttactacagccctgtgagagtagctaattttattaattgcattttccagatgagaacactgaagcattatagatcaaataatttgcttaaggccatgaaacttgtaagtggtagggtcagaatttgaatccaggcagtctgactccaaagtcttgccactaaccacactgcaatactgtctctaaatgggaagcatgtgtctgaggccctgggatccctcagatggctaccgtgactctctagcacctagagtaacaccaaggaagcctcttgtagcctcaagccctcctttgttgctgctggtcttaagtggctggttgcatttcatcttctgggaaatgctctggcaacctccccacagtcctatgccttttctctagggtggaaaccacccatttcccagttgagatcatttttccagtaggcatcttacattctaagaactatgaaaatagttttcctgaaaaagacaagggaagcagcagcagcattctcctttccccacacccatatacacgcctgtgccctgtaactgaagtgtgagaggcacagtgtcataaatgggtagatagtaagtggggactaaaactgtcaagggtgatctaattggggtgggctcatagtagtacttctgtgtgaatgctttggtggacccttaaggtactacatggaccagcctgggcaacatgatgagaccctgtctctacagattaaaaaaaaaaatttttttttttttttaaattagctgagtatggtggtgtgtgcctgtagtcaggaggctgaggtgggaggatcacttgagcttgggaggtcgaagctgcagtgatcacaccacggcacttcagcctggatgacagagaccctgtctcaaaaaaaaaaaaaaggtactacatggagataagcttgaagttactgtaaaaaagctacctttactcttgccctaagttatttattctgatacgtcctatgtacaagtcagtcagttcagtcctcatatctactaaaagctacctttatgcccaaggtgctagatgagaagacagggcccctgccctggtagagctgagttgggcctggtctcaaaatcccgactagagcctgctttgtttgctccttgaaggtgttagcccagctctcttttatctgccccttccccaggytttggaggagaagatacggaccacggagacacaggtgcttgtggcatctgcacagaagaagctgstagaggaaagactaaagcttgtctcagaactgtgggatgctgggatcaaggtatgggaggcaagccccagggtggcagcaaacttaggtgtgctggacacaaactgaataaaagctcacccataatggatcctgccattacttctcaaaagtagagctaagaacagrgtgccagcttggacaccctctgtccctgaggacagcagaagscagccttcatcttctgctcttgtcccctgcaggctgagctgctgtacaagaagaacccaaagctactgaaccagttacagtactgtgaggaggcaggcatcccactggtggctatcatcggcgagcaggaactcaaggatggggtcatcaagctccgttcagtgacgagcagggaagaggtgagggaggtgggcaggaaggctaagggacagagaatgtatgccattttggcaggcccatgcccattcaagacctgagaaaaagcctggcattgatattagtacaactcataaaagccttgagggcttaacctgttactgtggtcttagtagggtgagatctccatccctgcatataccttatggtttgttggctcccccaagaggcacactctagcctgaggtgtttaattaggttcctgctcccagctgagacaagcctgatgcctagagggctagaggaaactaggcactcggggagcagtggaatggaagatgcttataccaccttcttctcccatcctggccaggtggatgtccgaagagaagaccttgtggaggaaatcaaaaggagaacaggccagcccctctgcatctgctgaactgaacaaactatcagaggaaaggaagtgggactggcactatttgaggttaagacaaactgcatatgtacttcaattgctttgcacttttccgtttcagcggaagacctgaagagtggtcagaacagagcctttgatttttattatggttattttattgattattactggcaaaaacggccaggtacaacacctttttcatacaaggcccaggaggcttagtccagtctgtgctcctgggctacaaggacccagcctgagatggtcccatytgcagggccccgcaccagttggagcagatgcctccccmccaccaattgccaaaggtccaataaaatgcctcaaccmcggagtctgcgtgtgtcagtgatgcctagccccgccttccccagcagaccaatgtagggatggaaaagggagaaaaacagtaaacttgtgaccctgaggttcttgtctccagcgtccaccctgcggcttgggagctcctcctsgggaggcagcccccgtacatacgcacccgcgactttgcagctttcacctgaaggtctgagcgaagcccgggcggcgcacgtgcagtggatacctccacccccctgggaggcggggtcgcgctcagagccaatgagagcttgcggggtggaggggtagggaagcttccagaggccggtggggaggaagttataaagagggtacgagggggccagctggagagccatgcagtccaagcgggattgtgaggtaagcggctggcgacttgggggccggcgagccccgccggagcgggggtcggctttagggaccccagtaccacaggagaggtgggggcgcgcttggcgatccgccattccaaccttcctttccctctcagctgtggtgtgagagggtgaatccagagaacaaggcggcgctggaggcgtgggtcagggagacaggcatccgcctggtgcaggtgaacgggcagaggaagtatggcgggccacccccaggtacggtagtcccagcccctccgcctgtccggctacaccagccccctttgggggaggggctgctccgagccttcactgtcagaaactgcgaactacccggatttataccccccagcaaaggaggaactgtggctccacgtccacccgccccgtcgagggagggggccaatctcaaggtgtacctactctgtgccagcccccttgttagcgcagtcacctaattatgccaaccacccagggtacgggtgtaaacccatttcacagacctttgttcacatcgcctcccacccccgcgcgctgggtccgtgggctcagaattcgaaagcgtcgcctgacggtggccttgcataccctcttcccacaggctgggtgggcagcccgccgccagctgggtcagaggtgttcatcgggcggctgcctcaggacgtgtacgagcaccagcttatcccgctgttccagcgcgtgggccgcctctacgagttccgcctgatgatgaccttcagcggcctgaaccgcggcttcgcctatgcccgctacagctcgaggcgcggcgcgcaggccgccatcgccacgctgcacaaccayccgctgcggccgtcctgcccgctgctcgtgtgccgcagcaccgagaagtgtgagctgagcgttgacggcctgccgccgaatctgacccgcagcgcgctgctgctcgcgctgcagccgctgggtcccggcttgcaggaggcgcggctgctgcccagccccggaccggcgcccgggcagatcgctctgctcaaattcagctcgcaccgggccgctgccatggccaaaaaggccctggtggaaggtaggctggggcgggggtgctggttggggccaaacgcgttctgcccrgcactttatactgagcatagctgttaaagttacaagatcttagagtcaaacatgccagaatttgcaaccttttactatttgatctcagatttttaaaacttccaatggtgctaccaccaccgcttacctaaatttgtgacacttcccgagcattacctcctgacttaattctcaaccttcccccacccccacaccgcaaaataggcacaggaccctcaagctatgaggaaactgttagagaaattgatttgctcaagggaatccaactgagctttttactactatagaatctgtttcctcagactgttatgagaattaagtaacataatgggtgtacggtacttagcacactgactgacttacagcaagttttcccagtaaagattagccattatgatggttatgaggcagacaaagcctgcaattaaccagtacttctccaaggaaacttgtaaggtagcagtgtgttatactccctttgcaaataatggaggctgaaggcttcattgtcttttcttacccatggtcacactaccaggaaatgggaaggctacaaataacaggactgtgtagctccaaagggctcaccacctggaggcttgggcccagggtttagacctgcccttgtctttgcatttttcctacagggcagtcacacctctgtggagagcaggtggctgtggagtggctcaagccagacctgaagcagcgacttcgccagcagcttgtgggtcccttcttgcggtccccacagccagagggcagccagttggctttggcaagggacaagttagggttccaaggggctcgggctaccctgcagttgctgtgccaacgaatgaagctgggcagccctgtgttcctcaccaagtgtttgggcataggacctgctggctggcaccgcttctggtaccaggtggtgattcctgggcatccggtgcccttcagcggcctcatctgggttgtgctgaccctagatggccgggatgggcatgaggtggccaaggatgctgtgtctgtacggctgctgcaggcactcaktgagtctggggccaacctcctgtggtctgctggggctgaggcaggtaccatggttaaacagtgactccattctttctccacaggcaccctgaatgggcatgcagagcctgtgtcaggccccatcccagcaggcctgggtggccactttctgacccccaaaggtggggaggggcatgggcccaggcccatcagcctccctgctgggacagggacctatggcacctgggggcagcttaggtttgggttaagttgtggtgaggggccttgccctcccgctcccagcccagggtccaacctgacccagtkatcttccatggccrttccttgtcccaccsccacccgatcataccttcccccctctgccacagcttagcatgaatcttctttattgtcctgatttgtcctctttgttggtttttatttgtggggaagggcagctgagccaaaggggtcagaaattctgccctttgcctccaccacatggcattctggttttggtttctgtatagttttgggtctttctatgctggttgtatttatattaaacccctggttagtatatacttgtgtctgtgctgtcttgccctagcttagagtttgtttacactggtagagtgaatagctgctacggggcaagtacttcctcacatcagtgctttgagtgcatcttcttgtgytgcactgtagggtattataaattcatatccaggccgggtgtgttggcttttgcctgtaatcccagcactttgggaggctgaggcgggtggatcacctgaggtcaggagttcgagaccagcctggccagcatggagaaaccccgtctctactgaaaatacaaaaattagcctggcatggtggcagacacctgtaatcccagctacttgggaggctgaggcaggagaattgcttgaacccgggaggcggaggttgcagtgagccaagatcacgccattgcactccagccctggcaacaagagcgaaaccctgtctcaaaaaaaaaaaaaaaaaaaatttcatatccagccaggcacagtggctcatgcctgtaatcccagcattttgggaggccaaggcaggaggatcacttgagcccaggagttccaagaccagcttggtcaacatagtgaaacccctggtctctaccaaaaaaaaatcacaaaaattagtcaagcatggtggcagatgcctgttaagtctcagctaccaggcaggstgaggtggatcacttgagcccaggaagtcaaggatgcagtgagccatgatcaacccactgtactccagcctgggtgacagagtgagaccttgtctcaaaaaatataaatttttttggccaggtgtggtggctcgtgcctgtaatcccagcactttgggaagcagaggcaggtggatcatttgagtccaggagttgaagaccagcctgggcaaaacagacccgtttctaccaaaaaaaaaaaacaaaaattggcctggtgtggtagtgcacacctgtagtcccagctgctccagaggctaaggtggaaggacaatctgagcctggggacattgaggctgcagtgagccaagatcaagccagcgcactccagcctggacgatggcaaaaccctgtcttttcaaaaaataattcatatcctctctggggatgcagcccaataagcaagactcttgcctggtgaggacccrtctcaagattcaattcattccttcagtcactgtcatccccagtctcctccttttcttcctgagccatggagtcttctccctcttcyctcagtcctgcgaaraagtcatcggtgctccaagtcttgctgctcaragcccgcagtggtcctcccttttttttgcgccgacggtagtcatccaccaccacagctcgcagctgggccatgtcccaaaacttgaggcgctggtcatggccactactggccaggaagcggccacagtgggagagggccagctcctccacaggctccccagtgtgctggcccacactgcccaccactcggttcggtaggatgttcacagccctgggcagggaaagaacagtgttgagtactggctagctgggtctgcccttcctgtgacctaagggctgtccaggcttccctcacctgatgactccatcagtggagccagtacacagcagactctckgtgactggaaccatgcagtcgatagattcagctctcagggcaaagcggtcacttgtggccccaaagccattccaattgaagaggyagatggtaccttcactggagccacaggctaccttcttcccccactgcagggaaatagagaaaacaatgtggaagctgcctcagactaagcccccagcacacacccctccatcccaccataaccagctgtactttcatgagagtgacagaggtcaggtccccaractgaggttctgagagcagctcaaaccgacgcctcttaatgttgaagatgccaaggcagccatccccgctgtagagagtagagcagtaggcttagacgcaaggtctatttgaggaagacatttcacacagggaggggagrggaggcaaggcagctttgaagttgtacctggctgtcagcagcagctttttggctggatccagagccatgtctgcgatgtactcttcatgttgcctcatatccattaaggggccctccttccgctggtcccagagacrgataccacctgtgtcatccccagtggccagaacattctcatccaccagcagaagactrttgatgggggcactagagacacagatgtagaacttcttggagcatctctgtcccagtggggacctcctggtccttacccttcacctccatgcacatacacagaattggctgctctccttacccatgagccttggaaacacgtctttccagttggccctgctccacatctagaacatggatggctttgtccttggagacagtaatgagctctggggaaaaggtgcycaggtcatggtgctgctcactgctcccttccaccacattgctggttgtcttccccagtactcactctgcccatcttcagagaaggccacagctcggcaggccttgagatggtgacctgatgaccagagctccttggtttctccctcttggcaagagtaggaaaagctggggagagggcaaggagggtaaatgactccagacccagcctgggttgcattgagtgcagaraccaactagacagagcagccttcccacctacctaagagttcctgcttctacacctctaagcccaaaaagtttaccatctcatttctccattttcagtgagtttgaaatgttaggtcctgcttttttcaatatatgttagttcaaggtatatttgcrcaagatttctttgtgatcccacccaacccctctttatcatctttgaaagccccagcctggacaaagattgggtctggaccactgtggaggagatatttgttacatcaat

SEQ ID NO: 1601 - DNA, 21287 bp, Homo sapiens
tcttgtgtctggcattttggggaggtgctgacatgagaatctggagaaatggtcagggggagtgaaggtgtatgtgtgaatttggccagctagtgatctccattttcccagtatttttgaagacaytggggattacgtaccctccacaaccaagacacctcgggacaaggagcgggagagatatcgggaacgggagcgtgatcgggaaagagacagagaccgtgaccgagagcgagagcgagaacgagatcgggaacgagagcgagagcgggaccgagagagagaagaggaaaagaagagacacagctactttgagaagccaaaagtagatgatgaggtgagatgtgggcccttagtaccaggtgatggagttgcccctctctggaaatgtgagcaaggttgggtaaggaattgtttcaaacttgggggagggatgagtaggaatctctcatggtaacactaacttcacattttgtgttctttccagcccatggacgttgacaaaggtgagttgtacacacagcatctcacagttgctctagcagtcctgctttcccctggtagggctcagagctggcaacggtgggattgggggacctcctggttctgggttcttgtaagaactgtgtcttgctttattgaataggtggagttccctccaccttcctgggccatggcagggcatatttgctcttagatataattcctgtggccctggggttctgaggaggtgaggtagaggtcaagtatggaatgttctggataccctaccctcatctcaaccagagtgactcattaattggagtttgtttaaaactttgttagacaaaagggttctatgccttaaaaatgttttttaagtgtgttgtggggaggaggttgtgagagcctcasttcaagrtctgggctgagttctcttttctcctaggacctgggtctaccaaggagttgatcaagtccatcaatgaaaagtttgctgggtctgctggctgggaaggcacagaatcatatcctttattttaatacgttcctgggttccagagaactggtctctttactccaacccccmmtgcctccctgctccctcctaccctgcccctctccttcccttttaygctgaattttgacagaatgaaaccatcccttgttccttcccagagcacccataacagctcacagcccactcagaattttcatgttggggcttctagcccttggccccctcctggctgaagctttacagcaataggtagaatcctgtgtagtgttttctttaacatagcatatgctgaagaagccagaagacaaaaagcagctgggagatttctttggcatgtccaacagttatgcagagtgctacccagccacgtatgtgaaacctggttaaggaagggaggctgggatgattgggaaacaagttgggggtgaaatggaaatttgattcgctaagtcccagggctacttcttttttttttttttttttttttggagacagagtctcactctgtcacccaggctggaatgcaatggtataatctctgctcgctgcaatctccatctcccgggttcaagcgattctcctgcctcaccctcccaagtagctgggattataggcatgcatcaccacacctggctagtttttgtatttttagtagagatgaggtttcaccatgttggtgaggctggtcttgaactcctgacctcaggtaatctgccctcctcagcctccaaaagtgcggggattacaggagtgagccactgcgcctggcccaaggctacttcttacttggatgaactattttattaggctctaagtgggaggtctagggggtggtcattcctatgcagataacctcttagtcgggtaggtttccagatgaagcatagsgtcagggtatgcaacatctgtttaactcttgcttctccttaggatggatgacatggctgtggatagtgatgaggaggtggattatagcaaaatggaccaggtatgtagttagaaggatggtgggcgcctttgggcagttattatttgttttacatgtatctccttccccactcctaaaaaatctatctcatttactggrccccaccctcctttrgctgcagcagtagaaacagcagcattgagggtcatgagcagcttaactatttcagagtctttgcacaagatcaaatgacatagggtcaaaaatctattttttacttcctatagcaaagtgccaggctttgattcccatggtaggcagtaarcaagcatcaatgcataagtagaaagggcagaaaaaattgcagtctttggaaaataactaaattttattctagccaggattgaagttttcctctaagtcttaagcaaaattaaaaagaaaaaaaccactaatgccactaatagtgaagaagtctgtgttcttcccctgagttcactgtattgaaatagcatggtttaatcttggagccttgtttaatcctgcctctactgtttattagttttgtgaacttgccaagytctttcactgtttatgcctcagtttcctcatcaggaaaatggagagaaatatagttccctcttcatagattttatgagaattaagtgagatatgcatttagtgtacagaataatgcctgtcacatagtaagtatgtaataagcatttattattacttatcagggtatgatttatgaattgtggaacctgggattatgggagagtctggcttcaatcaagggctgaaattccatttccactgacatctcttccttccccatcccccrattctgtcctgcaacagggtaacaagaaggggcccttaggccgttgggactttgatacccaggaagaatacagcgagtatatgaacaacaaagaagctttgcccaagtgagtcggtactgaatatgggcagggtgtgaggaggggtgtggggatttggtggaatagtgcatataaggttagagggtgtggtctrgctgagatgttccccactaagttctttgcccacaggactctgggaaaacctcgccactgctatgcaatctctgatgcattctttcccaactgcttttttcagggctgcattccagtatggtatcaaaatgtctgaagggcggaaaaccaggcgcttcaaggaaaccaatgacaaagcagagcttgatcgccagtggaagaagattagygcagtaagtaggatggccccttgggtgggagggtttcagctgggagaagacattagcctgcagattcaggaacaggcaaggggctggagagccatggaaatgagaggtcagccttgggcctcaggtgagcttagatgggcagcttggtgatagactatcctgttgtttttgcagatcattgagaagaggaagaagatggaagctgatgggtgagcggcattattcttcctctgtgggactggtgggaattgcttagtgtattgatcttatactgacccatttctccttccattgcagggttgaagtcaaaagaccaaaatactaatcactagttacaaccagagatgctccacaaggatatgctccccackgwtttctttctacaatttccaaaggttgcaagatgtttttttgtggatgaatataaaattttattgtgtaattacttggttccattaaaattggttaacttgctattttcttkgttgagcatgtcccctccagtgcccttgaagcaccaagaacactaattccactggttgtgtaaaatcacatgcagaaagtcatcagtcctttcctgagctgtggttctagattcctagacagtaaggatgctctctagccagtgtgcccagtagagaagagaataatgatcctcactgatgggcaagaggtggatagaggaatgtaagtatgattggtctcaaatgtcagactcattccggcccatcttcaggcctagtccctggggaaagatttcctggggattgctgtcagcctgatgggctgctaatctgatctccaggctatgaaggactgggctctggatgaaggcatctaatgaaaatcacttatgggtgggaaccaaaaccttttatgagtttatgtactatgagctttattaatgttgagtacaaatcactgtctccttggctaaaggtgtaaccttagggaagtgctttgggtttagagctgatatagtgtggccctgcaggtacaggaattcctatcctagaccagaagggtttggtgcccttcatcaccctgaaacatttgccaaggcccagaataggtctgttgacctttgaatcacaccattcccttcccttttcttcccttctgctcattaccagcactttggcctggtgctcatcattaggtgtcactactgcttcctggctggatgccacgctgccactgtctaccctgagcccaagatttgtggcctcaccagatccaagaaagctagaaagtcaccttagccattaccttgtctttgattatattcaccttggtaggacaggtttttgtgaggaagccagtattgtgcatggcatgtaagaggctgaaattgggccttgctgcaatagcacctagaatggctaatttcagacaaatgacaccatggttctatggatgtaggtaggcagtcccaattattaaaaatggtcacagagacatggcacaggtgaagacatctggagagtcactaaaagcaagacctggagattgtgggtttgaaattcagtttctgaggccaggctcgatggctcatgcccacagtctcagtgctttgggaggccaaagcaggagagtctcttgaggccaggagttcatgagtctatagctatgcaggaggatcgaaccgaagagttcaaggctgtagtgagctatgatcacaccactgcattctgagcctgggtgacagagcaagaccttgatttaaaaaaagaaattcaggggctgggcgccgtggctcacgcctataatcctagcactttgggaggctgaggtgggaagacacgtcaagagttcaaggccagcctgggcaacatactgagtcctcgtttctacaaaatatacaaaaattggccaggtgcggtggctcacgcctgtagtcccagcactttgggaggccaaggcgggcggatcacgaggtcaggagtttgagaccagcctggccaacatggtgaaaccctgtttctactaaagatacaaaaaattagctgggcgtggtggcatgcgcctctagtcccatctactcggtaggctgaggcaggaaaatctcttgaacccgggagacggaggttgcagtgagccgagatcgcaccattgcactccagccagggcgagactccgtctcaataaataaataaaaattagccaggcgtggtgccgcgtgcctgtagttccagctactcggaggatcgcttgagccgagcggtgatcgtgccactgcactccagcctgcgcgacagcgcaagaccctgtctcaaaacaaagcaaaacaaaaaagaaaaaaaaattcttggtaactgagcactgcttgtccagcccattgagtttctgtagacaaattgtaggaactggcacagyaaactggccacaaagacgttaggggcgtggacaccagctgcttgagctgcctgctgtcccagactcccgtatgtcatcgcgcagcgtgggattttgcggcttcctgacagcccaggctgtcgcttgacttgatcttgggtttcaccaagccacgaaggactagcgtccctstctcctatsccaagggcattaagcctgtctggatgaagtaggagaggaaagatttacacgcagttcycaactttacrtgacgtgactagggagggaattgacggtcgcaccgtctacctagcccaaacggggtcacagcaggacaaggaagtagcmgatctcccagatgcggtctcttcgctccgctccacccrcaccagcagcggcccacccacctctcctgtaagaggaagaacgtcccggagayacttccggccccgccccccgaggcggaagcggagtgccaggctactcctcccgcagtgtgggtggttccgaggctgactaccctgmggcggcgcggytcgcagtccttctcagcatggaccgcacttgtgaggagaggcccgctgaggatgggagcgacgaggaggacccagactccatggaagccccaacccggatccgggacactccggaagacatcgtgctggaagctccggctagtgggctggcgttccatccggccygtgacctactggctgcaggggacgtggacggggacgtgttcgtgtgagagcggggcagggccggggcgccgggtctggaagcttcccgggggtggacctgggaacaggagagatgagagaaagtkgcagggagacaaattttgcaagattctttgggtccartttattcagtaacattcggctcttctatcacaccaatctgttgaaagaactggaatgtcgtgacagagcccagataccgtagtaggccaaaaagccctttaaggccttgttatttcccaccgattattatttatttacttacctatttatttttgagacggagtctcgctctgtcgccgaggctggagtgcagtggcgcgatctgggcwcactgcaacctcccccttccgggttcaagcagttctcttcctcagcctcccgagtagctgggattataagcgcccgccaccacgcccggctaattttttttgtatttgtagtagagacggggtttcaccatcttggccaggctggtcttgaactcctgacctcgtgatccacctgccttcctcccagagtgctgggattacaggcgtaaaccaccgtgcccggactcctaccggattattatattgtgcccgagacaggctcagcaggcccctttaagtgatttttcaaaccacaaatcttggctcacgcctgtaatacccgcactttgggaggccgaggtgggcgggtcacctgaggttggagctcgagaccagcctgttcaacatggtgaaaccccgtctctactaaaaatacaaaaattagcccggtgtggtggcgcgggcctgtaatcccagctacacgggaggctgaggcagaagaatcacttggattcgggcggtggaggttgcagtgagccaagatcgtgccactgcactccagcttggacaatagagtgagacactcccttgattaaaacccttcaatggtctgcttttaggatttagtacaaatttctcaatcctgccttcaacgccctgaccatctgtgctcattcatccataccttttaaaaatacgtcttgggccgggcgtggtggctcatgcctgtaatcccagcactttgggagaccaaggtggggtatcacctgaggtcaggagttggagaccagcctggccaacatggtgaaatcctgtctctactaaaaatagaaaaattagctgggtgtggtggcgggcacctgtaatcccagcttctygggaggctgaggcaggagaatcgcttgaacctgggaggtggaggtggcagtgagccgagatcgtgccattgcactccagcctgggcaacaagagcaaaactccatctcaaaaaaaaatctcgaaacctcagcccatttgcatgtgctattctgtccggaaaactcctttcccctcacttttacctactatctctgagtttccaggatctcttccctcttcctctctccccagactaaaattggttacctgttagatgctgccatggcaccaggtgccatggtacctttcccttaataatgaatggttggtaaccatatgtccatttgtgtaattatttgaatgctgtctccttcactaatgtttttcaaacgtctttgaccttgcctcacagagaaataccttttacattatatatgatgctctgtgatacaattgctgattttattctattattgtgtacatgtacacaaaatgctgatcgtagcttactagtccgttatatgactagaatgtgaaaaaacactgttctggagtgtaatctgtcatcggttttgttctctrttttatctccaacctctagtctagggtagatgctcaacacatgtttgattttgaacaaaagatacaggttagaggcagtggaaaagttgaagatgttatgcttatcagatttacttaatgaatttaaacctcaacccctcattagctgtaatggccttgagcgtgttaacttctgtattttcatctttgaaagggggaattatacctacccttgcagaggggacaagtttgcagtacagcacctaagcagctcttcaacaaatgtaggttcccttctactactatccatatttatggtgccaggcacttgggagttgccctagacatccacctttcttcacattccacacaactttgttgcttcccttgtcttaaaaaaggttctggaggaaaattcttggttctccccttccccaccctcagccatgactattgtgaaaaggttccttttccgaggattaaattcaaacttctgcttggctcatgtggtctcatgcccacccyagcccatctttctagattcagtcatgctactctcctgctacaaggaaccctcctcattccttatctctgctscctccagtatctggcccttgctctctgccaggcaaattctactcttgtatgatccaacccacatgtcaccaccttagctttccagggctctcttctcccttcccaagtattcattcaatttgtgaatgtttattaagctactttttcacgttcagcactgggatagagaaaatgagcaggctcagttctgcctacctggaactcactggcaattaagcatgtattcattctgccctttttgaggatctgctctgaggcaggcacttgggggtattccrtaaacagtactcacctcaaagttgtttacaggctggtgcctctcccccacctccattttgatcttgcctctttttcagcacgtactctcaatgtactgtaattaattgtggctttctctagctcctgcagacctgaagtgcaagagcctgctctaccttactgatttttagatttctaacttctggggctggtcttttgtcattgatgtaacaaatatctcctccacagtggtccagacccaatctttgtccaggctggggctttcaaagatgataaagaggggttgggtgggatcacaaagaaatcttgygcaaatataccttgaactaacatatattgaaaaaagcaggacctaacatttcaaactcactgaaaatggagaaatgagatggtaaactttttgggcttagaggtgtagaagcaggaactcttaggtaggtgggaaggctgctctgtctagttggtytctgcactcaatgcaacccaggctgggtctggagtcatttaccctccttgccctctccccagcttttcctactcttgccaagagggagaaaccaaggagctctggtcatcaggtcaccatctcaaggcctgccgagctgtggccttctctgaagatgggcagagtgagtactggggaagacaaccagcaatgtggtggaagggagcagtgagcagcaccatgacctgrgcaccttttccccagagctcattactgtctccaaggacaaagccatccatgttctagatgtggagcagggccaactggaaagacgtgtttccaaggctcatgggtaaggagagcagccaattctgtgtatgtgcatggaggtgaagggtaaggaccaggaggtccccactgggacagagatgctccaagaagttctacatctgtgtctctagtgcccccatcaayagtcttctgctggtggatgagaatgttctggccactggggatgacacaggtggtatcygtctctgggaccagcggaaggagggccccttaatggatatgaggcaacatgaagagtacatcgcagacatggctctggatccagccaaaaagctgctgctgacagccaggtacaacttcaaagctgccttgcctccyctcccctccctgtgtgaaatgtcttcctcaaatagaccttgcgtctaagcctactgctctactctctacagcggggatggctgccttggcatcttcaacattaagaggcgtcggtttgagctgctctcagaacctcagtytggggacctgacctctgtcactctcatgaaagtacagctggttatggtgggatggaggggtgtgtgctgggggcttagtctgaggcagcttccacattgttttctctatttccctgcagtgggggaagaaggtagcctgtggctccagtgaaggtaccatctrcctcttcaattggaatggctttggggccacaagtgaccgctttgccctgagagctgaatctatcgactgcatggttccagtcacmgagagtctgctgtgtactggctccactgatggagtcatcaggtgagggaagcctggacagcccttaggtcacaggaagggcagacccagctagccagtactcaacactgttctttccctgcccagggctgtgaacatcctaccgaaccgagtggtgggcagtgtgggccagcacactggggagcctgtggaggagctggccctctcccactgtggccgcttcctggccagtagtggccatgaccagcgcctcaagttttgggacatggcccagctgcgagctgtggtggtggatgactaccgtcggcgcaaaaaaaagggaggaccactgcgggctytgagcagcaagacttggagcaccgatgacttyttcgcaggactgagrgaagagggagaagactccatggctcaggaagaaaaggaggagactggggatgacagtgactgaaggaatgaattgaatcttgagaygggtcctcaccaggcaagagtcttgcttattgggctgcatccccagagaggatatgaattattttttgaaaagacagggttttgccatcgtccaggctggagtgcgctggcttgatcttggctcactgcagcctcaatgtccccaggctcagattgtccttccaccttagcctctggagcagctgggactacaggtgtgcactaccacaccaggccaatttttgttttttttttttggtagaaacgggtctgttttgcccaggctggtcttcaactcctggactcaaatgatccacctgcctctgcttcccaaagtgctgggattacaggcacgagccaccacacctggccaaaaaaatttatattttttgagacaaggtctcactctgtcacccaggctggagtacagtgggttgatcatggctcactgcatccttgacttcctgggctcaagtgatccacctcascctgcctggtagctgagacttaacaggcatctgccaccatgcttgactaatttttgtgatttttttttggtagagaccaggggtttcactatgttgaccaagctggtcttggaactcctgggctcaagtgatcctcctgccttggcctcccaaaatgctgggattacaggcatgagccactgtgcctggctggatatgaaattttttttttttttttttttgagacagggtttcgctcttgttgccagggctggagtgcaatggcgtgatcttggctcactgcaacctccgcctcccgggttcaagcaattctcctgcctcagcctcccaagtagctgggattacaggtgtctgccaccatgccaggctaatttttgtattttcagtagagacggggtttctccatgctggccaggctggtctcgaactcctgacctcaggtgatccacccgcctcagcctcccaaagtgctgggattacaggcaaaagccaacacacccggcctggatatgaatttataataccctacagtgcarcacaagaagatgcactcaaagcactgatgtgaggaagtacttgccccgtagcagctattcactctaccagtgtaaacaaactctaagctagggcaagacagcacagacacaagtatatactaaccaggggtttaatataaatacaaccagcatagaaagacccaaaactatacagaaaccaaaaccagaatgccatgtggtggaggcaaagggcagaatttctgacccctttggctcagctgcccttccccacaaataaaaaccaacaaagaggacaaatcaggacaataaagaagattcatgctaagctgtggcagaggggggaaggtatgatcgggtggsggtgggacaaggaayggccatggaagatmactgggtcaggttggaccctgggctgggagcgggagggcaaggcccctcaccacaacttaacccaaacctaagctgcccccaggtgccataggtccctgtcccagcagggaggctgatgggcctgggcccatgcccctccccacctttgggggtcagaaagtggccacccaggcctgctgggatggggcctgacacaggctctgcatgcccattcagggtgcctgtggagaaagaatggagtcactgtttaaccatggtacctgcctcagccccagcagaccacaggaggttggccccagactcamtgagtgcctgcagcagccgtacagacacagcatccttggccacctcatgcccatcccggccatctagggtcagcacaacccagatgaggccgctgaagggcaccggatgcccaggaatcaccacctggtaccagaagcggtgccagccagcaggtcctatgcccaaacacttggtgaggaacacagggctgcccagcttcattcgttggcacagcaactgcagggtagcccgagccccttggaaccctaacttgtcccttgccaaagccaactggctgccctctggctgtggggaccgcaagaagggacccacaagctgctggcgaagtcgctgcttcaggtctggcttgagccactccacagccacctgctctccacagaggtgtgactgccctgtaggaaaaatgcaaagacaagggcaggtctaaaccctgggcccaagcctccaggtggtgagccctttggagctacacagtcctgttatttgtagccttcccatttcctggtagtgtgaccatgggtaagaaaagacaatgaagccttcagcctccattatttgcaaagggagtataacacactgctaccttacaagtttccttggagaagtactggttaattgcaggctttgtctgcctcataaccatcataatggctaatctttactgggaaaacttgctgtaagtcagtcagtgtgctaagtaccgtacacccattatgttacttaattctcataacagtctgaggaaacagattctatagtagtaaaaagctcagttggattcccttgagcaaatcaatttctctaacagtttcctcatagcttgagggtcctgtgcctattttgcggtgtgggggtgggggaaggttgagaattaagtcaggaggtaatgctcgggaagtgtcacaaatttaggtaagcggtggtggtagcaccattggaagttttaaaaatctgagatcaaatagtaaaaggttgcaaattctggcatgtttgactctaagatcttgtaactttaacagctatgctcagtataaagtgcygggcagaacgcgtttggccccaaccagcacccccgccccagcctaccttccaccagggcctttttggccatggcagcggcccggtgcgagctgaatttgagcagagcgatctgcccgggcgccggtccggggctgggcagcagccgcgcctcctgcaagccgggacccagcggctgcagcgcgagcagcagcgcgctgcgggtcagattcggcggcaggccgtcaacgctcagctcacacttctcggtgctgcggcacacgagcagcgggcaggacggccgcagcggrtggttgtgcagcgtggcgatggcggcctgcgcgccgcgcctcgagctgtagcgggcataggcgaagccgcggttcaggccgctgaaggtcatcatcaggcggaactcgtagaggcggcccacgcgctggaacagcgggataagctggtgctcgtacacgtcctgaggcagccgcccgatgaacacctctgacccagctggcggcgggctgcccacccagcctgtgggaagagggtatgcaaggccaccgtcaggcgacgctttcgaattctgagcccacggacccagcgcgcgggggtgggaggcgatgtgaacaaaggtctgtgaaatgggtttacacccgtaccctgggtggttggcataattaggtgactgcgctaacaagggggctggcacagagtaggtacaccttgagattggccccctccctcgacggggcgggtggacgtggagccacagttcctcctttgctggggggtataaatccgggtagttcgcagtttctgacagtgaaggctcggagcagcccctcccccaaagggggctggtgtagccggacaggcggaggggctgggactaccgtacctgggggtggcccgccatacttcctctgcccgttcacctgcaccaggcggatgcctgtctccctgacccacgcctccagcgccgccttgttctctggattcaccctctcacaccacagctgagagggaaaggaaggttggaatggcggatcgccaagcgcgcccccacctctcctgtggtactggggtccctaaagccgacccccgctccggcggggctcgccggcccccaagtcgccagccgcttacctcacaatcccgcttggactgcatggctctccagctggccccctcgtaccctctttataacttcctccccaccggcctctggaagcttccctacccctccaccccgcaagctctcattggctctgagcgcgaccccgcctcccaggggggtggaggtatccactgcacgtgcgccgcccgggcttcgctcagaccttcaggtgaaagctgcaaagtcgcgggtgcgtatgtacgggggctgcctcccsaggaggagctcccaagccgcagggtggacgctggagacaagaacctcagggtcacaagtttactgtttttctcccttttccatccctacattggtctgctggggaaggcggggctaggcatcactgacacacgcagactccgkggttgaggcattttattggacctttggcaattggtggkggggaggcatctgctccaactggtgcggggccctgcaratgggaccatctcaggctgggtccttgtagcccaggagcacagactggactaagcctcctgggccttgtatgaaaaaggtgttgtacctggccgtttttgccagtaataatcaataaaataaccataataaaaatcaaaggctctgttctgaccactcttcaggtcttccgctgaaacggaaaagtgcaaagcaattgaagtacatatgcagtttgtcttaacctcaaatagtgccagtcccacttcctttcctctgatagtttgttcagttcagcagatgcagaggggctggcctgttctccttttgatttcctccacaaggtcttctcttcggacatccacctggccaggatgggagaagaaggtggtataagcatcttccattccactgctccccgagtgcctagtttcctctagccctctaggcatcaggcttgtctcagctgggagcaggaacctaattaaacacctcaggctagagtgtgcctcttgggggagccaacaaaccataaggtatatgcagggatggagatctcaccctactaagaccacagtaacaggttaagccctcaaggcttttatgagttgtactaatatcaatgccaggctttttctcaggtcttgaatgggcatgggcctgccaaaatggcatacattctctgtcccttagccttcctgcccacctccctcacctcttccctgctcgtcactgaacggagcttgatgaccccatccttgagttcctgctcgccgatgatagccaccagtgggatgcctgcctcctcacagtactgtaactggttcagtagctttgggttcttcttgtacagcagctcagcctgcaggggacaagagcagaagatgaaggctgscttctgctgtcctcagggacagagggtgtccaagctggcacyctgttcttagctctacttttgagaagtaatggcaggatccattatgggtgagcttttattcagtttgtgtccagcacacctaagtttgctgccaccctggggcttgcctcccataccttgatcccagcatcccacagttctgagacaagctttagtctttcctctascagcttcttctgtgcagatgccacaagcacctgtgtctccgtggtccgtatcttctcctccaaarcctggggaaggggcagataaaagagagctgggctaacaccttcaaggagcaaacaaagcaggctctagtcgggattttgagaccaggcccaactcagctctaccagggcaggggccctgtcttctcatctagcaccttgggcataaaggtagcttttagtagatatgaggactgaactgactgacttgtacataggacgtatcagaataaataacttagggcaagagtaaaggtagcttttttacagtaacttcaagcttatctccatgtagtaccttttttttttttttgagacagggtctctgtcatccaggctgaagtgccgtggtgtgatcactgcagcttcgacctcccaagctcaagtgatcctcccacctcagcctcctgactacaggcacacaccaccatactcagctaatttaaaaaaaaaaaaaaatttttttttttaatctgtagagacagggtctcatcatgttgcccaggctggtccatgtagtaccttaagggtccaccaaagcattcacacagaagtactactatgagcccaccccaattagatcacccttgacagttttagtccccacttactatctacccatttatgacactgtgcctctcacacttcagttacagggcacaggcgtgtatatgggtgtggggaaaggagaatgctgctgctgcttcccttgtctttttcaggaaaactattttcatagttcttagaatgtaagatgcctactggaaaaatgatctcaactgggaaatgggtggtttccaccctagagaaaaggcataggactgtggggaggttgccagagcatttcccagaagatgaaatgcaaccagccacttaagaccagcagcaacaaaggagggcttgaggctacaagaggcttccttggtgttactctaggtgctagagagtcacggtagccatctgagggatcccagggcctcagacacatgcttcccatttagagacagtattgcagtgtggttagtggcaagactttggagtcagactgcctggattcaaattctgaccctaccacttacaagtttcatggccttaagcaaattatttgatctataatgcttcagtgttctcatctggaaaatgcaattaataaaattagctactctcacagggctgtagtaacaattatattttgataatgcatgaaaagcaccaagcacagtgcctggcacaaggcagtaaaatgttaagtattccgtatcatgaggaagatctaagtcttggatacaccagcccaggtttgtgacagccctgaaggaagtagagacccagagcagaggattgagtgcagaaagattatggattaaagatccataaaacttacatataatggggtagaaatctgtgaaaaagagcaataatcttttctccatttctgtgagatgctccctgcccaaagcagcaccacttgctcccttggagatcagatagcttaggtgccaccacctgctcagactatcttctacctacctcctaggacctacctctagtctctgttccacgatggagaaaatccgctccaccccaatgctgagccccacacatggcaccttgcgccctttggggtcgaacatgcccactagcccatcatagcgtcctccagcagccacactgcccacacccaggggctcttcccctgcctgggctggggtctgtagcagcactgcctcatagatcaccccagtgtagtaatccagccctcgagcaaggctcaggtcaaaggagatctgtggagataagaaaatggtcagtgccagattaagatcagggacctgaagccccagagctcagaagggatccygtccccaacttgactcactttgtcatcaatgccaaatagggtcaggtactcaaagagcaacttcaggtctcccargccctccaaggcctgcttgttttgggatagtttaggatcctggascagctgttccaccagggataccccacctggggagacagacttgtgagtgaggctgacaaggaaacaaaaaaggtaaggagggttgaccttcttgcctggmctctagtcgcccatgcatgtgtgtgtacatatgcatagacacactcactcccctacatacataacacagaacagtttcaactttaggactgagggcagtgggacggctgctggggaggcttggttctgttcctcaccatgttgctggacatagtccccaatgcgrtcagccacctcwggtgcaaggcccttctctcccaccatctcattcttcacctcttcccaggacacctaggcagacagacaccagtcagggacccctgggcagcttccgcaccacagagcaagtgtgtactgtcctcggggaaccgttttagagcagtagctgcccatgagcctacatcctggggctaaccttcctctggtgggtatagaggcatgcacctctctctctctcaatcttgttttccatttcccaaggcagggtgggatctgggaaaaraagtcaagtacttgggttgttaccttgtccagcttgtctactgaggagcagatggtacggaacttgctrtcagaaacaccacagayagcaaacatcccatctagaatgcgtcgatcgtttacctgcaaggaaccaatgcatagtgaggggggaatctcttttcttacatgacctgcaatagtcatggtcacttaggctactggtccctctgcacaaggatcttctcttrtgagaggccaggcccaactttgccctcccagccttgtcagctctgaccttgaccaggaagtcgcctatctgaagtgaactcaggatctcrcacatgatcttcaggcactctgcatcagggatcatgggatcaaagttcccagcaatgtcaaaatcctgcagggagagggttagccagcggtcttcagggattcacctttctgaaggggggactctgggagctctgtcctctaggaaggcctggttgcactcaagcatagaatttctctttcattttctgatcatcagcccagaggtaaaccccggcatctttgggcttctcaccagttttggtttcctttccatctactgggctattccttcattttctacttcatcatcttcttaactcctcctactggatggggtgattatatggctttagtgcttagccattttccctattcatccagaagccctggcatcagtctggatgatttgatgtatcaaagctaatttccttattctctgctgtgatcctatcactgtggtttaaaataaagagcactggaccaagagttctagtcctgactttgcctttcttatccctatgatctcttcatgggctgggtatcaagtttactcatatgtaaaatgaagagactttattctcctcccccaccacagggattttgtgaaatctgcatgaaaacaccatagaagaggctgggtgcggtggctcacgcctgtaatcccagcactttgggaggccgaggcaggcggatcatgagaccaggagttcgagaccagcctggccaacatggtaaaaccccgtctctactaaaaatacaaaaaattagccgggcatagtggcaggcgcctgtaatcccagctactcaggtggctgaggcagaagaatcgtttgaacccaggaggcagaggttgcagtgagccaagactgcaccactgcactccagcttgggcaacagagcgagactccgtctcaaaaaaacaaaaaacaaacaaaaaaaccaccatagaaaccctaagagcattatctgggtcatccaatttgctcaggacaccgtgagtactcaatagattctgctggcttgagagagccccaagtaactcatcctgccccacggtttcccaacactcacacactggtagaattcccggtatcggccwcgggtcatggctgggttatcccgccgatatacctttgctatgtggtagcgtttaatgttggtcagtttattcattgccaaataccgagcaaaaggaacctgatgacaaagagttaaggagaaagcccctcctatcactgtctgcaagttgattatcatcaccaacagaagctggggtctaacccctccctatgtgggtaaaactgccacccataagattaatagcacttacaaacatcagaaagcatcagctgtgctaccacatgaggtagctgaaggytcaaaaaagattaaggcacctttcccttttgtagtgttgactggacttttttgagcatggcaaggggctgggcaggttggccacagaccagaaaaaggcgaccagaaaaaggcccccatatgggatttctaagcagatgattctctgtgtagcttggagacaagggaaatgtgttgctagtccattaagaagaattttgttcactggacagggcaggggagaggtattctggagccaggggatgactgtagagttggaactgggccctgacatcaagctgaggtctcactcaggattcagaagatttctaaggatgtgtatgctctgtttagccaaagttccactcctggtttagagaaataattcccctaatcgccaaaggcctcatatttgatcctacctactctaccattcttaaacctgagccaagtgagtgccaatccatccaaagtctcaagagcccaagtttagaaagatacagtgaggtcatagcgaagggacaggagctccccgccctgrtccttcaggtcatagataagcttggagtcttccccatactttcccatcagtgtttcctggagaaaacataaataaatgtggtcataataataaacataacaatttaaaaggaagttttgaaaacaaacatgactgattccaacttgtctacatttccctctgctctttatcccaattcttaggtgtctgatgtagttatcattaaaaggaaacaccaattttgtgtttttttctattttgattttgtaacagagctgaagtatttttcttacacattttcctcttaa

SEQ ID NO: 1602 - DNA, 27069 bp, Homo sapiens
ggtggagggaggagttggggctctgagggatggaccacaagctaagcagggctctggtactcactcacataggctggagggcagcatgcggaccctggtygggctcctgaccagcaaccaggccctgctgcagcttgaggcggctcggtgcctgcatgagctctctcactccgagcagtccactgttgctgaggcctgcctgccagccacttcttacctcctcacctacctctccagtcacagctcagacttcatagtaagccctgtcccttcctatcttgttcttggtttagattttaaaattgtgcttttgggaccagtttgagctggcaggtaggaggaagaaaacatgtttgcccttatgcctacagccatggctacacccatcatctccccaccctcttgtgagccgcaaggatagctgctccagcgtccccatcacctcccctccccatctccccacacgcagcctggcwtgaaacaggccaagcccagtgcttttgttgcctgttctcaggagctgtgtctgtatacactgggtaacctgatcgtggagagtgaggctgtgagaaggcagctcctgccacagggcattgttccagccttggctgcctgcatccaggtgactcctttcttcctccctgggcaacccttcctttgctcctccccacatgctccatctactttggttaggtagctccagcctctgccctgtgccaaggggctgaaagtctctgaagacctgatgacccagcttccagtcagatccttaccctgtctacttccagtccccccatgtggctgtgctggaagctctcggatatgccttgtcccagcttctacaggctgaggaagctccagagaagatcattccgtgagtaaaattgtctttagatgtgcagccagaggtgacccactcagtagtatagctcccggatgcctgaatgatttccaaagctgttgcacattttaaattcatgtgtctggctaggaagggctttgggtttggacactttcccatctgggcagggctttgggwttggacactctcccrcctgctatcagggtttggyaagaaccactggcatcttcgtggttcctacttacagccctgcttctgccagcagctccatcttggcctccactctccctcagcacatgctacaaatgttgcaacctggcccaaagctcaaccctggggtcgctgtggagtttgcctggtgccttcattacatcatctgcaggtaacagggcaattgggaaagtaccacagatcttccctggggctcccttccatgacattcaactctttgaacttgtgtctggaattgctatagtgagttttcctccctccactgtcttctctttttggagcccaggagacccacagaccttagctgtttctctttttttttgagacagtctcactctgtcacccaggctggatggagtacagtggtgcgatctcagctcactgcaacctctgcctcccgggttcaagcgattctcctgcctcagcctcctgagtagctgagactacagatgcgtgccactatgcccggctaatttttgtatttctaatagagacggagtttcgccatgttggccaggctggtctcaaactcctgacctcaggtgatccacccacctcagcctcccaaagtgctgggattacaggcataagccaccacgcctaggcaactgcttctcttcttaaaggtggaattgactatatacctagggactgcttgcttcctgttgcccagccaggtcagcaatcctctgctcattrgccatggggctctgtctactctggggttgctgctgttggacttggctggggctgtccagaaaascgaggatgcaggactggagctggtaggtgaagatgtcaggtgaaattctgggagatgtttcttgatactctggaatgcaggtaacctcttccttcttacacctgaccccccaatttgtctttgcagctggcatgccccgtgcttcgatgtctaagcaacctgctaactgaggcagcagtggagactgtgggagggcaaatgcagctcagagatgagcgtgttgtggcagccttatttatccttctgcagttctttttccagaaacagcccagtctgctccctgagggcctttggctcctcaacaacctcactggtacgcaccataatctgcccaggcctggacatttggataatggggatatttcctcatggcctaggctgaggtgggtagtattgacaggggtggtgggggaaagcagtttttcaccctggtacttctcttccagcaaacagtcctagtttctgtacctccttgctctccctggatctgattgagcctctcttacagctgttgccagtatctaacgtggtgagcgtaatggtatgtattggggttacttgaatccaagatctggtagtyggattgtatgggacagcagtcctgagccctcagatgtacccttagttgagagccagcaggtggtggtgtgtggcctcagggcccaaccaatctaggtgtgtgtcccttaaactggattatttatccttggacaaatcaactaaccaccttaagcttcagtctcctcacttataactgaggataatcttgcatcatagggtagttgtaggagtatgagaacatgyatgtagaagagcttggcatggtgcctgggcatgtggtcaccatgtcatatattttagctattgttatgatctktgtgtttcattctttgtagactatatatgtgtctatctgcaggtgctcacagttctgtgcaatgttgcagaaaagggtcctgcttactgccagcggctrtggccagggcccctgcttcccgccttgctgcacacactagccttttctgacactraagtagtaggccagagtttggagctgctgcatctgctgttcctgtatcagccagaggtataggtttctggcccacatcctcagtcacccctgttctgaagccacacagtggctcccttcccatccagtcctaactatagttgtttctctgggcctggctaacytatataggttccatgtcagaaacttcatcctcttgttggggaatgcaccctctggagtrggctgacccatgaggctgtgggaattgagtcttaggacacagagaccaggtgtgttgaattttcttccctgcccctaggctgttcaggtcttcctgcagcagtcagggctgcaagccctggaaaggcatcaggaagaggcccagctccaggatcgtgtgtatgctctccagcagacagctcttcaagggtgatcttgtttctcaatgtcactcattcccctctctcttaacatcaagcttgtttgtccagtagagcctttggagatttaggaccataatgaggtctcatgttctctgctcccacacctaagccaagacctttgggtcccagctcctccccttccactcagcactatccaggcaggaggaccaaaagggactcagtgtggtctacttactctggggccctagaatccctgmccccccgccacccttcatgtttgcttcagcagctggtagcttttgatgagacagaataaagttttatttttatattaagctactttgcctcagtggttgcacagtaaggggtagagggtagatgaggacaagaacaccctgagaaagtattttacagcacaagctttatgaggaataggagaacacatttttttcacattatactaagtccagcagagcccaggctctggggctgttgctcttaatcctcagtggaggcttcaggctttaccacttagaacgttctccagggctctggttacctgatcagcactgaagttgttcaaagggacattcgtctcttggccaaatgctgaagagagagagggaggtgtctttaactattctgcaccctggaggctaccaaagtaaaataaaagatctttgtctttatcttagtcttgttaagacaggaagagtattaaagagatatgatcaaaatacatttggtatgcctagaattaatacaataggtctcaaacacatctaggaagcccaagtccaaatagaattttggctgattctggatggccrcaatgggttgtttcagggaagctttcgggggcactgtaggcatttattattaactacggtgagcaatgtattgcatgggtccagcctcagctgggagcccattctctctctttttttttttttttttttgagacggagtctcrctctgtcacccaggctggagtgtggtggcacgatctccactcactgcaacctccacctcctgggttcaagcaattctcctgcctcagcctcctgagtagctgggattacaggtgcccgccaccayayccggctaatttttgtatgtttagtagagacggggttttaccatgttggccaggctggtcttgaactcctgacctcaggtgatccacctgcttcagcctcccaaagtgctgggattacaggcgtgaaccaccgcacccagctgggtacccattctctaggctcccataggctatctaacataatacccagcacaatacactaaagttactcgtgtctatctcctcctgtagtctactggcttttggaaggagaagcttttttccttctccaattattagtgcatgtctaatgtctactgtgtctcacagatatctactctsagaaccaatctgcttaaggtggtcactctcctccacctcctcccgtcattcccagggcaccatatagttaaaagctgtgattaaaatcctgttattcagtatgtataaacatttattgcatacctacaatgtgttaggcaacatgataggaaaatttsattttgcaatacattgccatgccagtcttagaggggtaagtgcattctaggaaggggaataaatgtaaaggctcaatcctgttaaactctagctgcatctaaagttgcagctagagtttaacaatagtgcaaaacaaagttttgattccgttttctaatctctacagtgagaaaagaagaacacgcttcctcctaactaatgaagattaaatgagttaggcagggaagcactcagcacagggcccagctctatgtgcaaaattactgagattctcacacactacctggactgacwctggctacacgttatttggagaaactatattgactaacttctctcctgtctgaagcccattcttaactacaaaaacgtcagctcctggtccctacgcaggattcggtcagcctgcatacttatgttgcccggaatacaacgcatcatataaccctgcgaatataaatttcttcatggaaacaagatcaacagcaaggctaaagtccgagttctagtttctccacgggtttctgcacgaccttgggcggtcccttctcttctcaaacccttgttcccctaccggagccccagacccytggcgtcccgcactcaccgtagcgggcccagagcttgggctgcacatcggagcattcgcggattaggatgggtaggtcgggattcgccttcttcagctccacgtagcgtttctcaatgaagtccctgcggggccsgagagagcgccgcgcgtgctgtgggcgggggcttccctcaacttcagggaggtcgaggtcgtgaccctggcgtcccgaagccygcccgcctcaccacgccgcgcctcacctgacgccctggctgccgggcgagcgctgacataagtggatgcgaatctcacgcaggcccasctttgccccgactcctcgacttgctgcggccgccgccatccttgttaatatcgaagtcgccaattccaggtcttcaggccaagtgcyccggtctgaccaaccgcggaccctaaagcctagcccataggctgcatgaggcaggggcggggtaaagcttggccaatgatataaaagyattgtaggaccgctgcgaggtcaatttctttgcgctcggggttggtcggagggaaaaacaggaagcggaaaggctgcgaacgcaaagcagtgtgggttgattctgaggtgcactgtgggaaagagcttgtcgctgcggtgttgytgttggagactcgattgttggtgacagcgaaagaacgataacaaaatgccggagcgagatagtaaggctcaggccatccgttatttcttccccatggcacttggggcacttggcgcattattgtagcttctgagcttaagccgggtgtgtgtgtgtgtgtgtgtgtgtgtgtgtgtgtgtgtgtrtgtrtgtatgtgtgacgcttgagcccggagaagccacagggtcctaagtgaggccgacagctccaaactccgtccccagtcctcactcctactccaagtgatgatgggcggcttttgtgcgtggatcgctttcccccagtcctgtccccatacttaatcctgggttgcgcgtatttatcttttacgtagtattttagacgtgatcttccggaagtcttctctgatcctccagcgcaggattagggtcctctgctttgtgctcccacagcttcttgtagtttcctatttcagcacttattacatygtgttgacactgtcgctgttctaacttttgttctgtattgttcactactatatctcaaatttttgcataggatctgacacgtaagagactgattaaattaacgtcaattttttttgtcaggtgagccgttctccaaccctttggcccccgatggccacgatgtggatgatcctcactccttccaccagtgagtattttgtgctaggaccatggaaatgagttgggcaatgaatagaaaagtggtggtgatggtgaaagaattctgaatgtcttgtcatcaaggatggtaaaaaattatacccgctggccctttatctctgtgagccttaactggatcaggccaagtgcataagggtattagaagggaaattcctgcaggaaaggtgttaagtttttttttttttttatacgtgttgtgtaattacacattatataggaattacttcttccaatagcaaattaaaacataggaaataagggtaaaatcatctttttattttttttgagactgagtttcgctcttgttgctcaggctggaatgcagtggtgcgatctcggctcaccacaacctccgcctcccgrgttcaagcaattctcctgcctcagccttccgagtagctgggattacaggcatgttccactacgcccggctaattttgtatttttagtagagatggggtttctccatgttgatcaggctggtcttgaaatcccgacttcaggtgatccacccgcctctgcctcccaaagtggtgggagtacaggcgtgagccaccgtgcctggcccccgataaaatcatctttgataacatccccaattccagtccatttcttttttyttttcttttcytttcytttctttctttttttttttttttgagacggagtctcactgttacccaggctggagtgcagtgatgcaatcttggctcactgcaacctctgcctcctgagttcaagcggttctcctgcctcagcctcccaagtagctgggactacaggcatgtgccaccatgcacgactgatttttttttttgtatttttagtagagacagggtttcactgtgttcgtcaggctggtcttgaactcctggcctgaagtgatccacccgcctcagcctcctaaagtgctggcattacaggcgtgagccaccgtgcccagcctcagtccttttcttagaagtaaccacagttaccttttttggcatatcttttcctcccgttgcccaggctggagttcaatggcattatttctgctcacagcaacctttgcctcctgggctcaagcaattcttctgcctcaktttccccagtagctgggattacaggcatgccccaccatgcttggctaatttttgtattagtagagacagggtttcgctatgttggccaggctggtcttgaactcctgacctcaaatgatctgcccgtctcggcrgcccaaagtgctgggattacaggcgtgagccactgcgcctggccctcctactcttttttaaatgcatttatacacatacatgcatatctgaggaaaacacaacattgctttgtgatttaaaatatttgagttaaatgatattatgctgtatatatcatttttgcaacttgcttctttttaaaccctgctcagtgtttctgagattatctttcagagcagtgacaagcattccctccttggctaaactttagtcaggttccccaaagagtcccatttttcagcaggactcatccgtggcctgctgagcacagttttaacaaagaaatcaaccaccgctccacccccatacctaaccaagttgcttttagtaattttctataaattctcacttgtccctgttgtattcrgaattaagttcagtctctctactctattacaatggtcttgactcttgttacagtagtcttcaataaagtcttccttggggagaagaggaacttgattagatatcaagttggattggatatcaagagtgggaaaactttctgtgaactgacttaggattcctttttaaaactgaggtcrgcaggccaaggaagagccctagtcagaagagagctttaaaggagtctgactttaatttgatcaagagaggagtctttgttagtgtaccaattaaaataatctcttgtaccattagtgctgtctttccctctttgggaaacaccatcatagtttagtcagtctccagctaataaacgcttagtctgtttcagactgattcttttcttttttttatttttttgagacagagtcttgctctttttgcccaggctggagtgtaatacctagatctcggctcactgcaawctccgcctcccaggttcaagcgattttcctgcctcagcctcctgagtagctaggattacaggygcccaccacaacgcccagctaatttttttgtatttttagtagagatgggatatcaccatgttggccatgctggtcttgaactcctgacctcgggtgatccgcctgcgtcagcctcccaaagtgcggcgattataggtgtgagccactgcacccggccagactgattattttcaaggctataactgaattaaatttacaggccttcttatatacatatgtcagtaatggaccaggctaaatataaataaatggagttgctggctcataggatatatatacttaaattttaacaaatactgcaaaattgcccttcaaattggttatactggtttacattctcatcagcattatatgagagagtccccttcccaaattctcactcacacttgatttatcaaactttytggtagttaacactctgatgcattaaaagtggcatggcatatctggtcgggcgtggtggcttacacctataatcccagcactttgggaggctgaggtgggcagatcacctgaggtcagaagtttgggaccagcctggccaacacctctaataaaaatacaaaaattagctgggtgtgttggcgggcacctgtattcccagctacttgtgaggctgaggcaggagaattacttgaacccaggaggcagaggttgcagtgggctgagatcatgccactgcactccagccggggcaacagagggagactctgtcttaaaaaaaaaaaaaaaaagctgggtgcggtggctcatccctataatcccagcactttgggaggccgaggtgggtggatcacaaggtcaggagttcaagaccagcctggccaatatgggtgacagtgagactccgtctcaaaaaaaaaaaaacagtgtcatatctttgttttaatttgtatttccctgatttctgttaatttaatcatgatttttacttgttcctttttcatttcttattgagtcctaatatttaaaatctttgccttttcttctagatcaaaactcaccaatgaagacttcaggaaacttctcatgacccccagggctgcacctacctctgcaccaccttctaagtcacgtcaccatgagtaagtctttgggtgatccaacctgtctcccaacttgtttcttgctccttcctatttctttctactaagtagaatgacttttaatagtccctcaggtatttatgatactctctaaagtttgagaactgcccacctacaaatattgrtgtggatttctgcttgattgaaagtgttactttgatcagtattctaggtctttctaaaaatcctcaaggagacttcttggggtttctggggctgtggcaatattttgctatcagtgaatttctcgtctcttctaggatgccaagggagtacaatgaggatgaagacccagctgcacgaaggaggaaaaagaaaaggtgaaggaagggtgaagggttttagattttaaggtggatagtgtttaggggaaagaagtaggggctaattatgaagctagaaactaagattttgtcttgaggctctctactttcttaatgaaacagagtgatacttagagtggcagtagagggctttggaataggcctatctatattttaatctcatcttcgctagtttcttggtggataacctagacatttgcttagcctctctaatccacagatagaatggagatmcagtagcaataataacttttatcaggatgtcatgaggatcagctgtgaaagtacatgtaggcatttagcaccaatgcctggcatatggtaaccacccaataaatcttgacggccatcatcattattatatcatcatcgttatttatatgatacgaaagtttcaggacctggtacttggcttttcctttattctgagagtggaccagcaaataatacgttcttttcagctgaaatttagaaggtggtaaaaattcagaagattttctgatttttgtgtggaaaagtcttatatctatagagaattggtagagttgggtggtattaaaaagttctgaagtgacagatggagtgtcccaagttggcactggaaaagtatatctataagctggaagaagttgtagttctgattttgagtaactacgaagaggtggccagcagttctatcaggacagacatgagcttttccccatagagagtasgttggagatgtagggaagcaagcaggaacagttctgttgaccttgaggtagcagctgatgagccttatacatttgcctttctctggtcacagttattatgccaagctacgccaacaagaaattgagagagagagagagctagcagagaagtaccgggatcgtgccaaggaacggagagatggagtgaacaaagattatgaagaaaccgagcttatcagcaccacagctaactatagggctgttggccccactgctgaggcgtgagtactgagggaacagggcatggttccctcagcatccgagagtcatgcaaatacaatgtgaactcttcctcttactttcctgccctggagcctacaataagcgatttcagaggcatttgccacccacaaagggctgttcttttttttttttttttttgagatggagtctcgctctgtcacccaggctggactgcagtggcacgatcttggctcayggcaagctccgcctcccaggttcatgccattctcctgcctcagcctcccgagtagctgggactacaggcgcccgccaccacgcccggctaattttttgtatttttagtagagacagggtttcaccgtgttagccaggctggtctcgatctgacctcatgatccacccgcctcggcctgctgaagtgctgggattacaggcgtgagccaccgcacctggccccccaaccccctttcccccaccccctttttttttttttggagacagagtcttgctcttgttgcccaggctggagtgcagtagcgcgatctcagctcactgcagcctccgcctcccatgttcaggcgattctcttgcctcagcctcccgagtagctgggactacaggcgcccaccaccatgcccagctaatttttgtatttttagtagagatggggtttcaccatatccaccaggctggtctcaaactcctgaccttgtgatctgtccgccttgacctcccagagtactgggattacaggcgtgatccaccacgcctggacagtactgttcttatgtggcctctttcattatacagggacaaatcagctgcagagaagagaagacagttgatccaggagtccaaattcttgggtggtgacatggaacacacccatttggtgaaaggcttggattttgctctgcttcaaaaggtgagtcctggtggtcaggtggggagtaatactgtcgtgctgaatgctcttgtatgggtctggcaagatgaggagggagattcctgagagttcagactgagtagaagaagggctaaagatggcccctctgaaaagctgattgctactcatccttcaagtatcaggccaaattttatttccttggagaaaccttccctgatcacccaggtgtggttaagcacttcccttcacctcctgcttcctgtacctttgcatagcccttctgtttcatttaccacagcagttattgtactttgttgaaattgtttaatttgtctgtctcatctgctataagctccattagagtaagaacaatatctgtcatgtttaatattatattcttagttcctggtacagtgtggtgtagtggatgttcaataaatatataaaatgagtgtcctaaccctgcttgctttcctgttaggtacgagctgagattgccagcaaagagaaagaggaagaggaactgatggaaaagccccagaaagaaaccaagtaagtaaatattatggaaaggttgagaatttagaaaggtgggacctaaagttagagcacatttagcaaaaataaaacttttttgtcttttcaggaaagatgaggatcctgaaaataaaattgaatttaaaacacgtctgggtgagtacagtttctatactagtgactatgcattctggawgaattgtacggaatttaatgctctgggaaggatatgcttctcctttcccccaacctcctttcttctttctttctttttgagacagtgtctcacttaatcgcccaggctggagtgcagtggtgtgatcatggctcagtgcagccttgacctcctggactcagcctcttgtgtagctggcaccacaggcatgtgccaccatacctagctaatttttttttttattttttgcagagatggggttctctgtgtattgcccaggccggtctcaaactcctgggctcaagtgatcctcctgccttgacctcccaaagagctgggattctttcttgcccccaaaacaactaactcccataaaatactctaataagactcagacatagatttaattatttcatatgtcatttatgtctcctcaggtagattgaaagatttttcagtttggggcttatgagttaaaagaagtaacatggttagtgattaaaagttcaaaayttggagtcagagagacctgagtttaaaccttgatgatgaaacagcactaagtgtatgattttaggcaactgactttgctgtttgttcatctgtaaaaattgggttactatttaccacatgactttattgtagggatgaagaaaaatgaaatctataacatgcctatcatattgagcaggtagtagagctgttttttccatcatcatcaatattaccttaaacttcatccttcttcctcacaggacttaatacaatacaggtgcatagtgcccttgaagaggcaatgtagaagagtggacaggagcccaggctttggagttacatggcctggttccattctttgctccattacttagtagatacatgactttaggtaaattacttaaatctcagccatagtattcttatcagtaaaaaggataataatatccacttcatagggctgttgcaaagattaaatgaygcaaagcttgcatagcacttggcatggtggctagcrcagagtaagcacataagtgacagctrttcttgtagatcctggctacttgctgctcttctccttattgtaggccgcaatgtttaccgaatgctttttaagagcaaagcatatgagcggaatgagttgttcctgccgggccgcatggcctatgtggtagacctggatgatgagtatgctgacacagatatccccaccactcttatccgcagcaaggctgattgccccaccatggaggtgagtgaatggaatcctgagagcctatcatgtgagcctcaagcctgggaatcagcctggcctctgccccgtgtcccttgtccaccatgtcaccaagtgctgttcacttttacctcctaaatctcaactgaatccattcacttttccactttttcaccaataacattccagtctaagctataatcatttgctggaactattaacttactatttttttagagaccaagtctcactctgtcacccaggatggagtgcagtggtgctatcttggctcactgcaaactccgcctcccaggttcaaacgattctcctgccgcagccttccaagtagctgggactacaggcattcatcaccacacctggttaatttttttatttttagtagagattgggttttaccacgttggctaggctattcctgacctcaagtgatccatccgccttggcctcccaaagtactgggattacaggcatgagccactgcgccagtcctctggagctattaaaaaggcttctaattggtttccgcacttccactctggtttccgcacttccactctgatttgttattatatcttgttattgaggtgttattcacatgccatataattcatcctttaaagagaatttttttaaaaatttttgtggatatatagtaggtatatatatttatgaggtacatgagatgttttgatacaggcatataatgcataataatcacatcatggaaaatggggtatccatcccgttaaacatttatcttttgtgttacaaacaatccatttatactcttttagttgttttagaatgtataaattattactgcctatagtcaccctgttgtgctatcatgtagtaggccttattcattctttctatttttttggtacctattaaccacccctacctcccctacccttctaaaatatacagtttggctgggtgcagtggctcacacctgtaatcccagcactttgggaggctgaggtgtgaggatcacttgaggttaggagttcaataccaggtgggccaacattgtaaaacctgatctctactaaaaattagccaggcgtggcggcatgtgcccgtaatcccagttactcrgaaggctgaggcatgagaattgcttgaacccagaaggtggaggttgcagtgagccaagatcgtgccactgcattctagcctgggcgacagaatgagactctgtctccaaataaataaataaaatgtaaatttttgtctcactacagtttagaagcttttagtagtatctcattcttaggataaagagcaaaatctttaccatgactttgagcctctgcaacatctggcctttctagaatgttctagactcctgactttcttgaatggtcttgattcattttgatgcagggcttttgtgcaggctgttttatctctggaatatcctttcacrgcacttcstttccctcccttcacctactgtattgtaattcagtctttagtttgttaagtgaatgaatgaataaatgaagagatttctgctgagtggtttaacattcttgtttcttggtattttcaggcccagaccacactgaccacaaatgacattgtcattagcaagctgacccagatcctttcatacctgaggcagggaacccgtaacaagaagcttaagaagaaggataaaggtacctggagggttagagagagaarccttacccacagaggacgtttggggataaaaccaaggtctcctggagctttctgtctccagaatattgagaggctcctgggaagcagagaaaaatgggagtactggagcattggcaaggagacagttacagccagattctgtctccttaacctacctaagaagcagtggtcaggtctgaagcatgagkgatggagagtgggtagcttatgtcctatttatttattttttttaaaagagattttttggtgaaaaccagaaaacctagacagattctaaaaaggctctaatacttgaccgacattttattttattttatttatttattttttgagacggagtctcgctctgtcacccaggctggagtacagtggtgcgatgtctgctcactgcaacctctgcctcccggggtcaagcgattcttctgcctcagcctcccaagtaggcactataggcactataggcacgcatcaccacgcctggctaatttttgtattttcagtagagatggggtttcactgtattggcctggctggcctcgaactcctgaccttatgatgtgcccacctcggcctcccaaagtgctgggattacaggcatgagccactcttcctggccttattttattatttttatttatttatttattttgagacgagtctcgttttgtcgcccaggctggagtgcagtgatgccatctcggctcactgcaacctctgcctcctgggtttaagcaattctcttgcctcagcctcctgagtagctgggattacaggcacctgccatcacacccggctaatttttttgtacttttagtagagatggggtttcaccatgttagccaggctggtctcaaactcctgacctcaagtgatccgcccgccttggcctcccgaagtgctgggattacaggcgtgagccaccgcacccagccttgacccacgttttaaacagaagatgtttaaaagggcattaagagctggagaggatggtgaagttcagtggaaattaactgaggagtatgttcctgactcctctctttaaatttcagggaagctggaagagaagaracctcctgaggctgacatgaagtatgtatcctagcccctggcatctgatcagagggagggggtctgtacatttcttgtgtctggcattttggggaggtgctgacatgagaatctggagaaatggtcagggggagtgaaggtgtatgtgtgaatttggccagctagtgakctccattttcccagtatttttgaagacaytggggattacgtaccctccacaaccaagacacctcgggacaaggagcgggagagatatcgggaacgggagcgtgatcgggaaagagacagagaccgtgaccgagagcgagagcgagaacgagatcgggaacgagagcgagagcgggaccgagagagagaagaggaaaagaagagacacagctactttgagaagccaaaagtagatgatgaggtgagatgtgggcccttagtaccaggtgatggagttgcccctctctggaaatgtgagcaaggttgggtaaggaattgtttcaaacttgggggagggatgagtaggaatctctcatggtaacactaacttcacattttgtgttctttccagcccatggacgttgacaaaggtgagttgtacacacagcatctcacagttgctctagcagtcctgctttcccctggtagggctcagagctggcaacggtgggattgggggacctcctggttctgggttcttgtaagaactgtgtcttgctttattgaataggtggagttccctccaccttcctgggccatggcagggcatatttgctcttagatataattcctgtggccctggggttctgaggaggtgaggtagaggtcaagtatggaatgttctggataccctaccctcatctcaaccagagtgactcattaattggagtttgtttaaaactttgttagacaaaagggttctatgccttaaaaatgttttttaagtgtgttgtggggaggaggttgtgagagcctcasttcaagrtctgggctgagttctcttttctcctaggacctgggtctaccaaggagttgatcaagtccatcaatgaaaagtttgctgggtctgctggctgggaaggcacagaatcatatcctttattttaatacgttcctgggttccagagaactggtctctttactccaacccccmmtgcctccctgctccctcctaccctgcccctctccttcccttttaygctgaattttgacagaatgaaaccatcccttgttccttcccagagcacccataacagctcacagcccactcagaattttcatgttggggcttctagcccttggccccctcctggctgaagctttacagcaataggtagaatcctgtgtagtgttttctttaacatagcatatgctgaagaagccagaagacaaaaagcagctgggagatttctttggcatgtccaacagttatgcagagtgctacccagccacgtatgtgaaacctggttaaggaagggaggctgggatgattgggaaacaagttgggggtgaaatggaaatttgattcgctaagtcccagggctacttcttttttttttttttttttttttggagacagagtctcactctgtcacccaggctggaatgcaatggtataatctctgctcgctgcaatctccatctcccgggttcaagcgattctcctgcctcaccctcccaagtagctgggattataggcatgcatcaccacacctggctagtttttgtatttttagtagagatgaggtttcaccatgttggtgaggctggtcttgaactcctgacctcaggtaatctgccctcctcagcctccaaaagtgcggggattacaggagtgagccactgcgcctggcccaaggctacttcttacttggatgaactattttattaggctctaagtgggaggtctagggggtggtcattcctatgcagataacctcttagtcgggtaggtttccagatgaagcatagsgtcagggtatgcaacatctgtttaactcttgcttctccttaggatggatgacatggctgtggatagtgatgaggaggtggattatagcaaaatggaccaggtatgtagttagaaggatggtgggcgcctttgggcagttattatttgttttacatgtatctccttccccactcctaaaaaatctatctcatttactggrccccaccctcctttrgctgcagcagtagaaacagcagcattgagggtcatgagcagcttaactatttcagagtctttgcacaagatcaaatgacatagggtcaaaaatctattttttacttcctatagcaaagtgccaggctttgattcccatggtaggcagtaarcaagcatcaatgcataagtagaaagggcagaaaaaattgcagtctttggaaaataactaaattttattctagccaggattgaagttttcctctaagtcttaagcaaaattaaaaagaaaaaaaccactaatgccactaatagtgaagaagtctgtgttcttcccctgagttcactgtattgaaatagcatggtttaatcttggagccttgtttaatcctgcctctactgtttattagttttgtgaacttgccaagytctttcactgtttatgcctcagtttcctcatcaggaaaatggagagaaatatagttccctcttcatagattttatgagaattaagtgagatatgcatttagtgtacagaataatgcctgtcacatagtaagtatgtaataagcatttattattacttatcagggtatgatttatgaattgtggaacctgggattatgggagagtctggcttcaatcaagggctgaaattccatttccactgacatctcttccttccccatcccccrattctgtcctgcaacagggtaacaagaaggggcccttaggccgttgggactttgatacccaggaagaatacagcgagtatatgaacaacaaagaagctttgcccaagtgagtcggtactgaatatgggcagggtgtgaggaggggtgtggggatttggtggaatagtgcatataaggttagagggtgtggtctrgctgagatgttccccactaagttctttgcccacaggactctgggaaaacctcgccactgctatgcaatctctgatgcattctttcccaactgcttttttcagggctgcattccagtatggtatcaaaatgtctgaagggcggaaaaccaggcgcttcaaggaaaccaatgacaaagcagagcttgatcgccagtggaagaagattagygcagtaagtaggatggccccttgggtgggagggtttcagctgggagaagacattagcctgcagattcaggaacaggcaaggggctggagagccatggaaatgagaggtcagccttgggcctcaggtgagcttagatgggcagcttggtgatagactatcctgttgtttttgcagatcattgagaagaggaagaagatggaagctgatgggtgagcggcattattcttcctctgtgggactggtgggaattgcttagtgtattgatcttatactgacccatttctccttccattgcagggttgaagtcaaaagaccaaaatactaatcactagttacaaccagagatgctccacaaggatatgctccccackgwtttctttctacaatttccaaaggttgcaagatgtttttttgtggatgaatataaaattttattgtgtaattacttggttccattaaaattggttaacttgctattttcttkgttgagcatgtcccctccagtgcccttgaagcaccaagaacactaattccactggttgtgtaaaatcacatgcagaaagtcatcagtcctttcctgagctgtggttctagattcctagacagtaaggatgctctctagccagtgtgcccagtagagaagagaataatgatcctcactgatgggcaagaggtggatagaggaatgtaagtatgattggtctcaaatgtcagactcattccggcccatcttcaggcctagtccctggggaaagatttcctggggattgctgtcagcctgatgggctgctaatctgatctccaggctatgaaggactgggctctggatgaaggcatctaatgaaaatcacttatgggtgggaaccaaaaccttttatgagtttatgtactatgagctttattaatgttgagtacaaatcactgtctccttggctaaaggtgtaaccttagggaagtgctttgggtttagagctgatatagtgtggccctgcaggtacaggaattcctatcctagaccagaagggtttggtgcccttcatcaccctgaaacatttgccaaggcccagaataggtctgttgacctttgaatcacaccattcccttcccttttcttcccttctgctcattaccagcactttggcctggtgctcatcattaggtgtcactactgcttcctggctggatgccacgctgccactgtctaccctgagcccaagatttgtggcctcaccagatccaagaaagctagaaagtcaccttagccattaccttgtctttgattatattcaccttggtaggacaggtttttgtgaggaagccagtattgtgcatggcatgtaagaggctgaaattgggccttgctgcaatagcacctagaatggctaatttcagacaaatgacaccatggttctatggatgtaggtaggcagtcccaattattaaaaatggtcacagagacatggcacaggtgaagacatctggagagtcactaaaagcaagacctggagattgtgggtttgaaattcagtttctgaggccaggctcgatggctcatgcccacagtctcagtgctttgggaggccaaagcaggagagtctcttgaggccaggagttcatgagtctatagctatgcaggaggatcgaaccgaagagttcaaggctgtagtgagctatgatcacaccactgcattctgagcctgggtgacagagcaagaccttgatttaaaaaaagaaattcaggggctgggcgccgtggctcacgcctataatcctagcactttgggaggctgaggtgggaagacacgtcaagagttcaaggccagcctgggcaacatactgagtcctcgtttctacaaaatatacaaaaattggccaggtgcggtggctcacgcctgtagtcccagcactttgggaggccaaggcgggcggatcacgaggtcaggagtttgagaccagcctggccaacatggtgaaaccctgtttctactaaagatacaaaaaattagctgggcgtggtggcatgcgcctctagtcccatctactcggtaggctgaggcaggaaaatctcttgaacccgggagacggaggttgcagtgagccgagatcgcaccattgcactccagccagggcgagactccgtctcaataaataaataaaaattagccaggcgtggtgccgcgtgcctgtagttccagctactcggaggatcgcttgagccgagcggtgatcgtgccactgcactccagcctgcgcgacagcgcaagaccctgtctcaaaacaaagcaaaacaaaaaagaaaaaaaaattcttggtaactgagcactgcttgtccagcccattgagtttctgtagacaaattgtaggaactggcacagyaaactggccacaaagacgttaggggcgtggacaccagctgcttgagctgcctgctgtcccagactcccgtatgtcatcgcgcagcgtgggattttgcggcttcctgacagcccaggctgtcgcttgacttgatcttgggtttcaccaagccacgaaggactagcgtccctstctcctatsccaagggcattaagcctgtctggatgaagtaggagaggaaagatttacacgcagttcycaactttacrtgacgtgactagggagggaattgacggtcgcaccgtctacctagcccaaacggggtcacagcaggacaaggaagtagcmgatctcccagatgcggtctcttcgctccgctccacccrcaccagcagcggcccacccacctctcctgtaagaggaagaacgtcccggagayacttccggccccgccccccgaggcggaagcggagtgccaggctactcctcccgcagtgtgggtggttccgaggctgactaccctgmggcggcgcggytcgcagtccttctcagcatggaccgcacttgtgaggagaggcccgctgaggatgggagcgacgaggaggacccagactccatggaagccccaacccggatccgggacactccggaagacatcgtgctggaagctccggctagtgggctggcgttccatccggccygtgacctactggctgcaggggacgtggacggggacgtgttcgtgtgagagcggggcagggccggggcgccgggtctggaagcttcccgggggtggacctgggaacaggagagatgagagaaagtkgcagggagacaaattttgcaagattctttgggtccartttattcagtaacattcggctcttctatcacaccaatctgttgaaagaactggaatgtcgtgacagagcccagataccgtagtaggccaaaaagccctttaaggccttgttatttcccaccgattattatttatttacttacctatttatttttgagacggagtctcgctctgtcgccgaggctggagtgcagtggcgcgatctgggcwcactgcaacctcccccttccgggttcaagcagttctcttcctcagcctcccgagtagctgggattataagcgcccgccaccacgcccggctaattttttttgtatttgtagtagagacggggtttcaccatcttggccaggctggtcttgaactcctgacctcgtgatccacctgccttcctcccagagtgctgggattacaggcgtaaaccaccgtgcccggactcctaccggattattatattgtgcccgagacaggctcagcaggcccctttaagtgatttttcaaaccacaaatcttggctcacgcctgtaatacccgcactttgggaggccgaggtgggcgggtcacctgaggttggagctcgagaccagcctgttcaacatggtgaaaccccgtctctactaaaaatacaaaaattagcccggtgtggtggcgcgggcctgtaatcccagctacacgggaggctgaggcagaagaatcacttggattcgggcggtggaggttgcagtgagccaagatcgtgccactgcactccagcttggacaatagagtgagacactcccttgattaaaacccttcaatggtctgcttttaggatttagtacaaatttctcaatcctgccttcaacgccctgaccatctgtgctcattcatccataccttttaaaaatacgtcttgggccgggcgtggtggctcatgcctgtaatcccagcactttgggagaccaaggtggggtatcacctgaggtcaggagttggagaccagcctggccaacatggtgaaatcctgtctctactaaaaatagaaaaattagctgggtgtggtggcgggcacctgtaatcccagcttctygggaggctgaggcaggagaatcgcttgaacctgggaggtggaggtggcagtgagccgagatcgtgccattgcactccagcctgggcaacaagagcaaaactccatctcaaaaaaaaatctcgaaacctcagcccatttgcatgtgctattctgtccggaaaactcctttcccctcacttttacctactatctctgagtttccaggatctcttccctcttcctctctccccagactaaaattggttacctgttagatgctgccatggcaccaggtgccatggtacctttcccttaataatgaatggttggtaaccatatgtccatttgtgtaattatttgaatgctgtctccttcactaatgtttttcaaacgtctttgaccttgcctcacagagaaataccttttacattatatatgatgctctgtgatacaattgctgattttattctattattgtgtacatgtacacaaaatgctgatcgtagcttactagtccgttatatgactagaatgtgaaaaaacactgttctggagtgtaatctgtcatcggttttgttctctrttttatctccaacctctagtctagggtagatgctcaacacatgtttgattttgaacaaaagatacaggttagaggcagtggaaaagttgaagatgttatgcttatcagatttacttaatgaatttaaacctcaacccctcattagctgtaatggccttgagcgtgttaacttctgtattttcatctttgaaagggggaattatacctacccttgcagaggggacaagtttgcagtacagcacctaagcagctcttcaacaaatgtaggttcccttctactactatccatatttatggtgccaggcacttgggagttgccctagacatccacctttcttcacattccacacaactttgttgcttcccttgtcttaaaaaaggttctggaggaaaattcttggttctccccttccccaccctcagccatgactattgtgaaaaggttccttttccgaggattaaattcaaacttctgcttggctcatgtggtctcatgcccacccyagcccatctttctagattcagtcatgctactctcctgctacaaggaaccctcctcattccttatctctgctscctccagtatctggcccttgctctctgccaggcaaattctactcttgtatgatccaacccacatgtcaccaccttagctttccagggctctcttctcccttcccaagtattcattcaatttgtgaatgtttattaagctactttttcacgttcagcactgggatagagaaaatgagcaggctcagttctgcctacctggaactcactggcaattaagcatgtattcattctgccctttttgaggatctgctctgaggcaggcacttgggggtattccrtaaacagtactcacctcaaagttgtttacaggctggtgcctctcccccacctccattttgatcttgcctctttttcagcacgtactctcaatgtactgtaattaattgtggctttctctagctcctgcagacctgaagtgcaagagcctgctctaccttactgatttttagatttctaacttctggggctggtcttttgtcattgatgtaacaaatatctcctccacagtggtccagacccaatctttgtccaggctggggctttcaaagatgataaagaggggttgggtgggatcacaaagaaatcttgygcaaatataccttgaactaacatatattgaaaaaagcaggacctaacatttcaaactcactgaaaatggagaaatgagatggtaaactttttgggcttagaggtgtagaagcaggaactcttaggtaggtgggaaggctgctctgtctagttggtytctgcactcaatgcaacccaggctgggtctggagtcatttaccctccttgccctctccccagcttttcctactcttgccaagagggagaaaccaaggagctctggtcatcaggtcaccatctcaaggcctgccgagctgtggccttctctgaagatgggcagagtgagtactggggaagacaaccagcaatgtggtggaagggagcagtgagcagcaccatgacctgrgcaccttttccccagagctcattactgtctccaaggacaaagccatccatgttctagatgtggagcagggccaactggaaagacgtgtttccaaggctcatgggtaaggagagcagccaattctgtgtatgtgcatggaggtgaagggtaaggaccaggaggtccccactgggacagagatgctccaagaagttctacatctgtgtctctagtgcccccatcaayagtcttctgctggtggatgagaatgttctggccactggggatgacacaggtggtatcygtctctgggaccagcggaaggagggccccttaatggatatgaggcaacatgaagagtacatcgcagacatggctctggatccagccaaaaagctgctgctgacagccaggtacaacttcaaagctgccttgcctcccctcccctccctgtgtgaaatgtcttcctcaaatagaccttgcgtc

SEQ ID NO: 1603 - DNA, 12912 bp, Homo sapiens
  misc_feature (1)...(12912): n = A,T,C or G, or insertion/deletion polymorphism (see Tables 1-2)
cactctgccttgatattaccttgtcaaactgaaagagcagtaactgtcagttgaacctttttctgtaaatataatctagtcagaatttttaacatggatgtaacaaccatacccttgagataatcctagtcttaaggctgagtttttttgtttgtttgttttttgtttttttgagacggagtctcactctgtggcccaggctggagtgcagtggcatgatcttggctcactgcaagctctgcctcctgggttcacaccattctcctgcctcagcctcccagtagctgggactacaggtgcccgccaccatgccaggctaattgtttgtattaatagtagagatggggtttcaccgtgttagccagggtggtctygatctcctgaccttgtgatgcacctgccttagcctcccaaagtgctgggattacaggcgtgagccaccgtgcccagccatggctgagttttaaccaggcttagaaactcaaatactattcagtgttgagaagcagttgcctcttccagctctgcaaaatctcaagtttctagactcttctttctgatatatttttttcctgcttgcaaagtagtataaaattgtcagaatcaaaatgaagtcacttgtgttaaaactctgacaaatggagctggagaaggccatgaggggagagttcttaatgtaaatacgacttataacaagagctaccagaaaagactctacaaaacaacaacattgcacaaaggccactgcaaccctacacaaaaagatacttctgcaaggacatctgctcanaacctccttgtctaaccttagacaggtgtcacccttgttcctgatccttggatccaaggttaattatctcaaaacaattatgtaatcttcctcttttagaaatccttgtcttttctaatgtccctgaatanacacataatttactatggcacawgtattctcattgcaatattactcccaaataaatatcattttcttttagagcatctccctctgtttgctatttagctagacagtaggcaattattttctaaagtcaatttttttaattgtcaaatgaaccattaatatattcaattatattttttttctagagttacaaaactttcaaatatgtgatttacctcccacataaccacaggtgactgctatcgaatgttttgccactccctatcttgttttacagtaaacagtaatgttttttcttgccactcactgccaatgaatcaagtattaagccagtgtcacataagttaggtgttttgttttagtaacataccagttcaagaggccagtctcatacttgccaagatagcttagtctatgctgtactaacaagatccccaaakctcagggactccacgtaggagaagtttttgttgtttgtttttgtttttgatttctgttacatgtcctgtgctcatagtggtcacaaaagaatccaggctgatagatggtttattgacccttgtttgagtgtcaaggcaagaagatgagaaatttgcagtcttatagtggtgagtaaatgctctcactctgaagcaacatgtcatttccacaatattttattgaccaaaaatttacataatatacaacttcaagggggagaggggactcctacaagactacatttcttatcctacaaggaataaaatgttagcatatagctctaggtcccattttacgacctctatgctatgtacaagatatatatctaaatcctaataacaaagagaagttaaaagtaaaatttagaaaaatcacaccataaaacactaacawaaataagctaatgtaatcattttaatatatactaaatagattttttttttttgagacggagtctcgctttgtcacccacactggagtgcagtggtgtgatcttggctcactgcaagctccacctcccaggttcctgccattctcttgcctctgcctcccgagtagctgggactacaggtgcctgccaccatgcccggctaattttttgtagttttagtagagacttggtttcaccatgtgttagccatgctggtctcgatctcctgacctcatgatccrcccgcctcggcctcccaaagtgctgggatttcaggcgtgaggctaaatagattttaaggaaaaagacattagaatagataatgtcacctcatgtgagtagaggttatatttgccatgaagatactacaattctaacgctctatgcactcatcagcatggcatcaaaatatgtaaagtaaaagttgacaggacttctaaaagacatagataaacctatactcatagcaggatrgtttaacattaaatctcaagaaataatagaataaaaagacaaaactcagaaaaggtaaataggatttaaataacatgattacaaatagatctagtggatgtatgaaacactgcaccccaaagctacaggatacacattattttcagcaaacacaaaacatttatcaaaattgaccatatatgcataacataaattttagcagagaaaattttatgtaaatggaaactygaacatatattttaaaaatagtctatggtggaagaaaaatcacaataaatttagaaaatatttaaaattaagtataataaaatatagtaaaaccttgtgagaaatgctgaaaaattctaagaggaaaacgtatgccaggaatataacagcaaacatactcaacggaagtaaaaataattaaataacaatataagagatgaaattaatgaaaaataatacatctgaaaagatcgaccaagacagacttgaatagactaacaaaataggcaaacttctggtaagataaatcatgaaaagaaaagcaaataatatgaagaatttaaaggatatattctgttggtattaaaaatttaataagatgatattataatcaaaattacatgaaaacataaataattgaaactgacaaatatctagaaagtcgtaactgccaaaacaagaccagaagaaataggcaacggaatggttccagatcaagatcatagaaatgtatgctcatgtactcaataataagttacatgttaaagaatgttcgtagcatcatcatcatcatagtctccaaactcaaaataaaccaactttgtgtttccactagactagataaattttgaattgtcattccattaatactatacagcaattgaataaatgatctatctctatatgcaacatgattaattttagaaacataatattgatcaaaaatagttaaattcaaaaatattgtgtacagtattattccattcatgtgcaatccaaaaccaggcaaaaccaagctagtgcttagggatacatattcaaattaaaatatacaaagttaaacaataacgtgatttgaattgcagatagttgttacttctggaatgaagataggggttgtgattagaaaggagcaaataaggtgttatggggtttacaaagttctctttcttgccatgggaggcttttaaattagtgtgcactttatactatagcatttaaacttcattaaatgttctatatttgttatatgtaacaataataggcagcaaaaatgaaaaagagaaaagaaatatttctaaacaaatgatatgaggttagctaaatcttaataccaaattctcataggcacaatatgagaaatgaaaattaaatgtcaatattccttaaaaacatagctgcaaatatcctaacacaacgttggcaaactgcatccatcagtgacttaaaaaatactttacatactcaaacctttcattgtttcctcttcctgccctttgcctcattttccttttcagttcagactgctgaaaaagtttttctgtgatgctccctagcatctattctctttctcttatagaagtgagagactacatctctttgattaaattyatatttttaaatgttttctcttatggaaacacaccaggaaaatgcagctcagaaccgcaagcctgttatccattctctatgtctttgtcatgtgttatatcacaagttctaaaaactgtggtattttttcatataccagcaagtacagtaccattcctcaggcctatttgtacagatttgggrtattatcaagttgtgaccggcatccccaaacccttttctctagataggtaggaagaacaccctaaaatgaaaaagtataaaagatctcttcagccctgggtcaagaatgcaaatggaagaccacatgccacatagctacatatttaaaggtcataaatatacaaacctaacaaactgttaaaggagayattttctattctatcttgacaaatataccattataacaacaaaatagaaaatatctacctattttaagttataattgaaacttgcaaatcattaaagatgatgcaattattttgtaaattttttagtactctgtagatcacccaataaagattgcatgagtaataaaatacaaacattcataattcacaaattatatctttattaaataaaaatagctttgtattcatctagctaaatggctacttattatcttataatyaagataaagtgttttatttatattaattttgaattagacaatctttcttgagtctccacgttttcagaattttggtaatccactttttttcggtagtttttgaaagagtggggcggggtgaggaaccttgactcttcacaatgaacacattagtcccygcttatctgcagtttcagtgacccaaggtcaaccacagtccaaaaataggtgtgtacagtacagtaaggtatcttgagagagtgagagacaccacactatatattttaacacatttttttactttttatttttttaatttttatttattttagatacagggtctccctatgttgcccaggccggtctcaaacttttgggctcgagcggtcytcccgcctcaatctcccaaattgctaggattacarggatgagccacaacccctggcaacttttattatagtatattgttttaattgttctattttattattagttatttttgtaatcttttactgtgcttgatttacaaattaaactttatcataggtaggtgaatacaggaaaaaaatatattgtatatagagtttggtactatctgctgttttaggcatccactgggggtcttgggacataggcctcatggataaggggaactagtgtatctatttctttgcttggttttcagttttgcaagttatgatgtaatatagtactgctttctttggtagctgttgctgattttgtaaaatttgtttttttatcacttttaagtttaaaaaagaaatatgaggggaaaagcggataaaatgtgaaggcatttggtgcctatggagggatggtggtgagcactgctaagtagtgatgaggcagggaatgagaaagatggatgctttgtaaaygagtttctctttagtcacagtattgaccagatccagctttagctccacaagaaattgagcactcttttgaaatagcataggtaagtctttgcatattttataaagcttcattggctatgctattagccataaaagcttcatttagctacatattctatgaatcagatttttataatatttgtacctcagaactcaagctggttgaatctaattttctatgctcagacaaggcaaaaaagtacaaaacaatgaaagagaatatatctttatttgcatggttgcaaatgtgagtttaactttgctgcataatcatctatgaaatatttctgcccatggtgaagacataaatatcttagctagggctcagcagagaaattgaagaaaaataaagatatcaccagaacagttatgtgaagatcgatcagcaaactttagagatttctgctttgacgttgagccaacaatgaaagaaggagcagaaaaaggagaaggaagaagaactccactggacactcaaggatgtgaatagcattttagatcagtgaataaccagcagtgacattagacattgaactttctctgttctgacatggaaagtgccctgccgagtatcttcactcttgtaataattgcagaattcataattgggaatttgagcaatggatttatagtactgatcaactgcattgactgggtcagtaaaagagagctgtcctcagtcgataaactcctcattatcttggcaatctccagaattgggctgatctgggaaatattagtaagttggtttttagctctgcattatctagccatatttgtgtctggaacaggattaagaattatgatttttagctggatagtttctaatcrcttcaatctctggcttgctacaatcttcagcatcttttatttgctcaaaatagcgagtttctctagccctgcttttctctatttgaagtggagagtaaacaaagtgattctgatgatactgctaggaaccttggtcttcttatttttaaatctgatacaaataaacatgcatataaaagactggctggaccgatatgaaagaaacacaacttggaatttcagtatgagtgactttgaaacattttcagtgtcggtcaaattcactatgactatgttcagtctaacaccatttactgtggccttcatctcttttctcctgttaattttctccctgcagaaacatctccagaaaatgcaactcaattacaaaggacacagagaccccaggaccaaggtccatacaaatgccttgaaaattgtgatctcattccttttattctatgctagtttctttctatgtgttctcatatcatggatttctgagctgtatcagarcacagtgatctacatgctttgtgagacgattggagtcttctctccttcaagccactcctttcttctgattctaggaaacgctaagttaagacaggcctttcttttggtggcagctaaggtatgggctaaacgatgagaaactcacaatttcataagccattcagaccacagattattgaatattgcagacagaaacaggagtctacaaggagtttaaaagatattttatgcttcccctggtttcttttattgtgaaggtcactgtaaatgttttaaattcttctctataatagcatcttacctaagaatattatgtatttatgacatgtatttctacattattaggaatttgaaacttatttgaggaaattattggcagattctattgtaaattaaaaacatatactacagcatacttagatgttarttgtaaatctacaatcttttgtttggcaatggctcttcaattctaaatcattcattgagatgggtgatttaggtaattattttattatctcaagtactcctatttaaatggtgagctacagataattagaacagttatttggaatagaattagggaagtttggacttgccactattactatactgatgtgttgagagaattgagagggttaaaaagtttaatatgagtaactgccacataaaaagataacggttttttagtaattatattgtatgtatgtgtacatacatattttacattatgccttttaaagtaaatattattgaggtataatttacatataataaaatgcaacatgttagtccacatttcagttagagttttgacaatgtatacacttgtgtgaccacaatgtcagtgccctttgcagtttaccctctcccctccagccctttttcccaagcaactacttatctgcttttggtaacaataagagagtttttgatttctagaattttatgcatctatatatctatagatatagatatatagatgccatatatacacacacacacacacatacagttatagagtgtgtattgttatatgtgaggcttctttaactcagcataatgtttttgaagttcttctgttttgttgtattaatcagtagtttgttcctgagcagtgttcctgagtagtgttggatataccacattaaaaaatttctctttcctgttaatgaacattcaaatggttttcaattattggccattataaataaaactgatatcaacattcatgtatttctcttcttctggatatacaatttcctcactcttgagtaaatacctatgagtaaaaatgtcaaatcatatgataagtgtatgtttaacttaagaaaaaactgccagagttctatagagtggttgcaccatttcatactattgccagcaatatacgagtgtttcagttatttcacattctggccaacagttggtaggtactctgttttgttttctattttggccattctagtcagaatgtaatggcatctcatcatagttttaattcacattttcctaatggctagtgaggctgatgattttttcatatgctttgggtcattcatacaacctctttttatgaaatgtttgtttaaaccttttgccaactacttagcttgattcattgctttctgtttttattactgagttgtaaatgttctttatatagtctctgtattagtccattttcatgctgctgataaagacatactcaagactgggtaacttataaagaaaaagaggtttaattgactgacagttccacatggctggaaaggcctcacaataatggcagagacaaaagtcacgtcttacatggtggcagtgaagasagaatgacagccaagcgaaaggggaaaccccttataaaaacatcaagtttcatgagacttattcactaccatgagaacagtatgggggaaaccacccccatcwttcaattatctcccactgagtccctcccataacacatgggaattatgggagctacaattcaagatgagatttgggtggggacacagcmagaccatatcattctgaatataagttctttatcagacatatgttttataaatattttctgccagccagaggcttgtcatttcattttctttacagtgtctttcaaagagaggacattaaaaacttttaatgaagttcaataatcaactattttcctgtaagaaaattatttttaactttttttgctttcaaaaytcaaagatattttatggawcagttggaataaatatttgcaataaggcacagttatccttgagtataaggacagaaagcctaatttcattttctctgctgtcagaacaggttctttggtgataccacatgcatttttagtaacctgtttcaatagtactatctacttgagcattstcattttctctcttttattttctttttagaaaggacctcccaaatgggtttgcttaaaagttaggtaagtgagaggagtagtatgatcatttttatcattaatttctctgaactctcttgtagtttatttacccaatagcatctttcaatatctgtcagtattttcacctctgcactcatatggtccscacaaaaaacactataatagttaaggactgagtctggagtcagaggtacaattctcaattctatcacttagtagtgttagttaaaattgtatagttcctatttataagtgaaacatgcagtatttggttttctgtttctgcattaattcactcaggacaatggcctttagctgcatccgtgctgctgcaaaggacatgatttcatttttttttaatggctacatagtattctatggtctatatataccacacttttttggtctaatccatttttttttctttgagacagaatcttactctgtttctcaggctgaagtgcagtgacatgatctcagctcactgctgcctccacctcccaggttcaagcgattcttctgcctcagcctcccaagtagctgggattacaggcaggtgccaggacgcccggctratttttgtatttttagtagagacagagtttcaccatgttggccaggctggtcttgaactgctgaccacaggtatctgcccaccttgacctcccaaagtgctgggattacaggcatgagccactgtgcctggcctgtaatccattgttgatgggcacgtaggttgattcccatgcctttgctattgtgaatagtgttccaatgaaattgtgagagtacatgtgtctttctggtagaatgatttattttcttgtgaacagagtgagaggacaacagagtgaaactctgtctcaaaaaaaaaaaaatggattagaccaaaaaagtgtggcgtgcatacaccatactgagtaatgggatgactaggttgaatggtagtttattttaagttctttgagaaatctccaaactgctttctacagtggctgacgtaatttgcatgcycaccaacagggtacaagcgttcccattgctccacagcttcactagcatctgttttttttttttttaactttttgatagtagctattctgactggtgtgagatggtatctctttgtggttttgatttgcgtgtctctaatgattagtgatgttgagccttttaaaatatttgttggctgctcgtatgtcttcttttgaaaagtgcctgttcatgtcttttgctcgtttttaaaggggttatttgttttctgcttgttcaattgtttccattccttatagatttgggatattagacscttgttgcatgcatagtttgcaaatcttacattctataggttgtctgtttactctgttgatagtttatacaatgtgtgcagaaattctttagtttaattaggtcccacttgtcaatttttgttttttgttgcaattgcttttggggacttagtcataaattctttcccaaggccaatgtttagaatggtgtttcctaagttttcttccaggattattgtagtataaagtcttacatttaaatttttgacccatcctgagttaatttttgtatatggtgaaaggtaaaggttcagtttaattattttgcttatggctagccagatatcccagcaccatttactgaatacrgagtcctttccccattgtttatttttgtcarttttgtcaaacatcagatggctgtagttgtgtgtctttatttctgggttctctattctgttccattggtctatgtgtctgtttttataatattaccatgctgttttggttactgtagctttatagtatagtttgaagtcaggtaatgtgattcctctggcttttttctttttgcttagggttgcttttgctatttgggctctttttttggttttatatgaattttaaaatagttttttttttctagttctgtgcaaaatgacattggtagcttgataggaatagagttgaatctgtaaattgctttgggccgtacaaccattttaacaatattcattcttcctatccatgagcatggaatacttttccatttgtttgtgtcatctatgatttctttcagcagtgtttcacagttctctttcacctccttggttagctgtagtcctagttgttttttttttttttttttttttttttttttttttttttttgaggctattgtaaatgggaytgcattcttgatttggctctcagcttgaagatttttattgtatagaaatgctactgatttttgtgaattgatttgtatcctgaaactttacagaagtcctttatctgtgccaggagccttttggcagagtctttagggttttgtatgtatggattcacatcagcaaagagatatagtttgactatggcttttatttttctatttggatgcctttttttttcttgcctgattgtcctggctaggactttcaatactatgttgaataggagtgatgggagtggggacccttttcttgttccagttctcaaggggaatgctttcagtttttgcatgttcagtgtaatgttagctgtagttttgtcataratggctcttattattttgaggtatgttccttcaatgcctaattatttgagcgttttttcaagagtccagaatttccttgttarttttctgcctcaatgatctgtccaatcttctcagtggggtgttgaagtcccccaatattattgagtgggtatctaaatctttttataggtttggaggtacttgtttcatgaatctkggtgctccaatgctgagtgcatgtatatttggggcagttaagtcttcttgttgaattgaacmctttattattatgtagtgcctttctgtgtcatttttttactgttgttggtttaaaatctgttttatcttatataggaatagtgattctttctttttttcttttctatttgtgttacagatccttctacaaccctttactttgagcctaacagtaacattacatgtgagatgggtctcttgaagacagcagaccgatgacttttgttttttattgaatttgtcactctgtgacttttaagtgagggtatttagaccatttacattcaaggctaatattgctatgtgaggttttgattctattttgaagttgttagctgggtgctttgtagtttctattgtgtggtttctttatagggtcttgggctatgtgcttaggtgtgctattttggtagcagattttcatgtttagaactcccttaaggatctcttgtaagactggtccagtggtaataaattcctttaccctttgcttgtctataaaagattttatttctccttcagttataaaggttagtttgatggaatatacaattattggttggaaaattttctttcctttaagaatgctkwaagtaggcctccaatctctcctggcttgtaaggtttctgctgagctatatacttggccttatggggttccctttgtatgtgatctgatctttttctctagctgcctttaagatttttttctttagtgtagaccttggatagtctggcgactatatgctttggtgatgttcatttcctatagcatcagtcaggtgtcctcttgatttcttgtatctgtatgtctacctctctagcaagattagggaaattttcttaaattatttcctcaaatatgttttccaggttattaactatttctccttctttctcagg

SEQ ID NO: 1604 - DNA, 12788 bp, Homo sapiens
ctgtcacccaggtagtaagcatagtaccccaataggtagtttttcagcccctccctccctcccctctcctctcatagaccccagcatctgttgttgtcatttttatgtccatgtgtacccagtgcttagtttccacttttttttttttcaagttggagtctcgctctgtcacccaggctggagtgcagtggcaatatctctgctcactgcaacytccaccttcgaggttcaagcaattctccctgcctcaacctcctgagtagctgggattacaggcacctgccaccacacccagctaatttctgtatttttgtagagacggcgtttcaccatgttggccaggctggtctcaaactcctgacctcaagtgattcacccacctcaccctcccaaagtgctgggattacaggcgtgaaccaaygcgcctggccagtttccacttataagcgagaacatgtggtacttagttttctgtgcctgtattaatttgcttaggataatggcctccagccayatccatgttgctgcaaaggataaaattttgttcttttttatggctgcatagtatctcatggtgtgtatgtaccacattttcctatcacctttatattctgctggttaaaaacaagtcacaggttctgtctacactgaaggccaggggattctacaaaggtttgacttgtggtttaggatatgttcaccatgttgcagaaattatatatatattttttaacaaaattggccactatttagtatgcttttttctttgtacatgaagcacttttgaaaaaaagtcactgactacagtcttagttaccaagttgaaatcaaagatagatttttcttccaactgcaagaaaaattcagtgagtttagaagaaaaaagttattctactcagctgggtttgacagaaacactatttctgtggcctcctgtccccatcccctagttatgccttaaggcccttctcaaatatcttctccagaaagactttcctaatacttctaactggaattgttctccattttagtgcccatttattattgtacttccggtttactttaccattatttggatagatgatttgtctctctgtctggttggtaactgaaggtaacagaaactcagcaaacagatgttacattcatgagatcacatattttatatatgtgtgtgtgtgtgtgtgtgtctgcgtgtgtatttttttttttttgagatggagttttgctattgttgcccaggctggagtgtaatggcacaatcttggctcaccgtaacctccacttcccaggttcaagcgattctcctgcctcagcctcccgagtrgctgggattataggcatgtgccaccatgcctggctaattttgtatttttagtagagacagggtttctccatgttggtcaggctggtctcaaacgcccaacctcaggtgatctgcccrcctcagcctcccaaagtgctgggattacaggtgtaagccaccgtgcccagtccacatattatatttttgaagcctctcmggcagtataatatatgctaacataaggtttgatgaattataaaagcaattaattttaggtattgggacacactaaaatctatccagtgtagatttccacactgggagagcaatagcctgtcatagcagctttgcaatcagrtagccctgagatccatgcctgacatctccaattaatggctgtgtgacctggagcaagaaacttaatgtcgctaaatctcactttccttaatagagtcattactgaataaatatcaagctattcttaatatcaacttggaagtattaacatttcttaacacagttcacaccagggcacggactccacagtttaacctcatctccaggaggttagcatgcacacgtatcatgttcattcggtaggacagtaacctgctagcaaatgtagactaaataaacactggatcattcctgtagttatttataaatagtctccatctttggttgtgattttagtggttagaatactagaaaaagagtgggtagagggacaggacataaggaattccatgttaatcagtagcatgggaaggctggtcattttcacaaaaccaagggagatgaaataagattgtcctaaacactgttctgagaattacacagaacatgaaaggctgcttggagtgagtcagagctgggatgttataacagatccgggctctgtcgaacactcagtcccccttgccaaatgtaggaattcacaagatcaggctcaaacttaaaagtcaatttcttgtargctgggtgctcacggctgtaatcccagcacttygggaggccgaggcgggtggattgcttgagcacaggaattcaagaccagcctgagcaacatggtgcaactctgtctctacaaaaaagtccaaaaattagctgggcttggcggcatgcgcctgtagtcccagctactcaggaggctgaggtgggaggatcacttgagcccaggaggctgaggttgcagtgagcagagatcacgccactgcagtccagcctgagggagaccccgcctaaaaaacaaaacaaaccaaaaagtctatttcttaaataccatgctagagttatgttcattccttgcagtcatctaatcagttcccataactttcttgataaaaggcagatgttgcttttccatagaatagagatggttatcttggccaaggtgtttatgcargagtgcgggtactaagatgattctagatttgtacctttttaaaagtctgttgtacagttctgtgttctgagattaggtggcattgtgtttcctttttacgttttttattctgtttccacagagaacatttacacactttcaaatgatcctgrtaactattccatacatatgatatcattggcatctatatactttgaaaatatggtagtaatttttttttgccatttatatctactggtgacccccataacttgaagctactttttagtgaccacaaaacttacttaaattcccaatgtatattattattatttccagtacctaaaatcttttaaaacttatagtataaataattacaaaataactttgaggagaaatttagagagtgaaaagagtaagagagaagagaaacaagaggaggagaagaaagaggaggcagcctagacttgtgaccaaagcttttacatggggkgaaaaaaagctaaactatattaagagtacatttatgagacaatggcaaagcgaacaagcaagagaaaggattttgacatatctcagttgacattatgaaaactctcattgcttatccttggaggaaatatagcaaccacctgactactcacaagcagcaaatgctagagaagactctcccctcttaatatcaataaactaatccccaccttacatgccatttaagtacaaggagaaagtagggaggtatataggcttttagttcttttaacatttgagaacccattttggccccaagtttagatacctcaacatttctgtcactaaccttcttccctccctccttcccctgcttcctgaccccccaaacccacccctttgtctctctctctcccccgaccctctcctcctcttcccttgcttctgagttgggrgggatttgagaagaatgaacccataccaacyccgccctagccagcattcaagatggccccatgaatcttgtctcctggtattcatgctttttctgtagtctcctcccatatggactcagagttggtctgtgtaactcacagggtgtagtgggggtgacagtgtgtcacttccaaggctgggttaaaaaaatgcacagtggcttcctacgtgcaccctctctgtcaacttccattttgataggatgctcactcatcacgtgtagaggcccatgcagataggaactggggcctcccagtgacgaccagcaccaacttgccagccgtgtgaccgaaccaccttggcaatggatccttcagccatagtcaggcctttagctgactgcggccttggtcaacatcctgactgcaaactcacgagagacacagagccagaccccccagctagaccactgccaaattcttgcctcagagaaaccataagagacagttaatgcttattgttgttctaagccaataaattttgaggtaataggttatgcaacaagtacatactatgtaataggtatgcaatagtatacaataatacaaatactttaaaagaaaagtcagaaatctaaggataacaaattcagagctttttaaaataagaatgttatctcccttgagtatttagagcctctagtaattgtccttgtagaatttgaagaaggttgcaaactttccttctttgttatttagagaaaatgtgtaacaaaacctataagaaatcactgctaatctatacctcaggagcctcatctcctgataactttttttggcaaaatatcagtgctcttccattgtgtgtgttcaaagttttagtcatccttacttagttaagatgattatatatgagtataccttttagttaacttccttttgatacatggtttatttcatgcctagggtaatgattgatgtttattcaaatgagctgatgtggatgcaagttcctcagtgctatacagtaaaattgctgttgacatcttccagaacaaaactgagataagatcctaattgtggattcccaaatattacttttcaaatactgttacattatgctgactattattttccattctggtgcttcttaagctcattacatggtgatgatttgtatatgggaacagtctgaagaaaaacaattgtgtgattttagataaaaacaggattcaaccgagatatggagtatctcaaagtaaaatgtgctattcccatctttctattctgtgtttggctccaagtccttaaacattcattcaatayacactatacagatgttcaaagaatgcctagtgtgcattgcttagtgctcaactgtgctaagcattattccacacatggggatggaacaatgaacaagacaaacaaaggttctgccctcatgaagtttacattttagtctgggagrcagttaataggaaaacaagtataaaacaatataatgtgggatattgttaagtactaaaaagaaaagggtggccgggcscagtggctcacgtctgtaatcccagcacttcgggaggctgaggtgggcggatcatgaggtcaggagatcgagaccatcctggctaacacggtgaaaccccgtctctactaaaaatacaaaaaaattagccaggcgtggtggygggcgcctgtagtcycagctacttgggaggctgaggcaggagaatggcatgagcctgggaggcggagcttgcggtgagccgagattgcaccactgcactccagcctgggcgagagagcaagactccgtctcaraaaaaaaaaaaaaaaaagggcagggtagagggatagacaatggctgcaaagttgagggatctaatttagatggaggatcaggggagtaaaatatgggcagggacttgaattatatagaaagagcaaaccatgcagaaatctgggggaagaacatttctaacggggaaagatcacgtttttaagccgtgagtgaacagaagcttggcatgtgggagcttaagagtaagagatgagagaggctgtcagagtacatagggcatgatggggaagggggatacagtagaagatgasattggagaaataaacaggaaacttgcaagcccgggtaaggacttcggtgtctattcaatgcatgatgagaagccacaagaaaattccaagcaaggaagttatgtgatctaatttaattttttaaatagcacactttgcagctgcatgawgaatagtctggaggtagcgagaaagccagcaagaccccttgaagggttactgtagttcaggccagaaaccatggtggcttgtggggtggaagtagttagtggaggcaataagaagtgatgggagctgcatctgctgcaagaatgaaggctgttctcagtaatcagactgtccacattccagaaaatgtcgacatcactctgaaggggcacagttcttgtgaaaggccctagaggaccctgcagagggacttcagtcacgtcagtatagaactcgggctccttggaaagaaaaagcagaggctccagattgacaaatgctgagaagatgggaattggctgccatgcgtgctatctgtagtcatgcacagaagatgatcaagggcgttatactgggcttctgtgacaagatgaggtctctgtgttctcacttccccatcaatgtcattatgcaggagaatagctctaytgtagaagtcagaactttcttgagcgaaaaatatatctgcagggttcgggtgagcccaggtgttgcttgttcaatatcccaagcccagaaagatgagttcrtccttaaaggaaatgacattgaacttgtttcaaattcagctgctttgactcagcaaaccacaacagctaaaaaccaggatatcagaacattttrgatggtatctatgtctctgaaaaagggacagttcagcaggctgatgagtaaaatctaagagttgtacagctacagaaacaagatgtcagataattcctaagacctatttgtgatattttaataatgyaataaaagacagctattgaaaaataaagtagtgatgaggtttcaagacatgaatgatgggatttgctgatggctagcactcaggatgtaagggaaagagaaggattgaggctaactattgagttttggtctaagaactgcatgaaaggtggtatttatggacgtggtgaagagtaagggagagcaatttgggaggtggaagagaaccgagagatctgtggccaggttaagtttgaggtgtgtttatacatttccatatgggaatgtcaagtaggcagctcgaaatacaaatcgcaaagatgttggactcaagctataaacttgagagtcaccacaggagaaattgtgtttaaggccatgagactatttgctgtctcttaaggcagtgaatgtaaatagagagaagttctaagaaccggccttgaagcactctagcattagaggccgaaggtgaaaaggggtacccagtaagatggaaagcccagaagagtttccagatgaggacgatgtttcaggaagaaaagaaatgagtgatccattttatccatgctacagagtgtccaaaacaaatgaggaccgagaataatcttttgaattggacaagacgaggtcctggttgacattccaggaaggggcggagacagagcctgagtgaagtgtgttgaaagaatgaaaggtaggaaagtagacaccatgaaatacaaacagatgtttcaaggaattagctgtgaggacaaacagaaaactgatacagtacccagctggaaatgttgatttcctcagatttcttatctacaaggtgaaaaattttagataacttctaaatcccaatgtattacattgccaagtcaaaaaaacatcctagggtgagtgcctgaaaggctaaattgtgaaaaagagtcattactcgggttgttgatgtcctaaatatgatggtgtcattactgactagggagggtgctagcatcatttgtatccaatgcccatgtaatgatttgagatgacaatggaaacgttaagaaataatttaaatctattatgagaacaactctcatttattagtttacttgtagccatttctgtgattcaaatgagcattatgattattttctgacagaaagaacgaaatctcaggacagttccatgtccatctgtaattagacctcatggccagagggccacaacagtgaggtatgtgacacatcacctctgggctgctgtagctgggcggcatgatgactaagtgaaaatgacaacggcaatagtaacaggtgtcactataccactttagaatttacaaagccttttcataaaaattaacatatttaggctgggtggggtggctcacgcctataatcccagcactttgggaggccgaggtgggaggatcacccgaggtcaggagttcgagaccagcctgaccaacatggcgaaacctgtctctgctaaaaatacaaaaattagctgggtgtggtggcgcatgcctgtgatcccagctatctgggaggctgaggcaggagagtcgcctgaacctgggagctggaggttgcagcaagctgagatcacgcaactacactccagcctgggcgacagagcgagactccatctcaaaaaataataataacatatttaatcatagggaccatttaaaatgctctttcatttgtattaaattagttctccaactctgacagtttgagcatggttggcccagctatcctgatggctccttcctgctattttttttttaatgtttaaaactcatcttttcaagctcaagagctgttgctttgaagaggatttgaataagcatctgaaactgttggctcagacattgatccaactcaaatttccaaagctgctaccagaatgcttttcccatacagatccaaaatgaatgtgaaatgctgcctgtcctctttctcctgtcttcctttcagtgactccactttctccacagtggccctccacgtcaggcagcccttctaaagaatccactgcttgggtgtgtgtgttccccacgttgcattcagaaggcacatccatgcatctcaggcgtgtaggttcttcagcatgaatcatgcaaacttggtgaaccataaacctctccctgtggatatgagtttgttggtattttagtctgcttggaaacagtctgagaaacattaaacccagcttttttgaggttagtccaaattatttttttagactagagaaaaaaaaatattatgtctcctaaggaaacttgtaaccacgaacagtaaattttaaatgttttagaatggttttctttttccccctcccacatcccccacttgtgcatagttgaaatccctagtttctctcaccaagaaatactacatgctagactcacagatccatgggctgggcctgtgcaaatggatttcttagattaaaagtataaaaacaaggctgggcatggtggctcatgcctgtaatcccagcactttgggaggccaaggcggatggatcacctgaggtcaggagttcaagaccagcctggccaacatggtgaaaccccgtctctactaaaaatacaaaaaaaaattagccaggcgtgatagcaggtacctgtaatcccagctactcaggaggctgaggcaggaggatcacttgaacccgggaggcggaggttgcagtgagccgagatcgtgccattgcactccagcctgggtgacaagagtgagactccatctcaaaaaaaaaaaaaaaaaaaaaaaaaaaatatatatatatatatattatagaaacaatatatgctccattatactgaccccaccaatcttaccctttctccacttttccagttcaatcatcccctaagtattcgtgtatagtaggattttaaaatgcacagtaccattcatgtgcagaaaagcacctttatttataaaatatgaattcaacttgctctacttggcaggaaggtacctagacctcactcacctrttcaaggaaactgagtcacttccwgtttcaaaccacagtttttccaggttaactcaatctctgtagcatttaccatatccagcctcaaaggaccccacccatccatcctttctttgttcctttggggaaagaggaacctgtgagaagaagaaaaccacagggaaataagactttgagtttggagaagaataagagagcattataaagtgataaaacctaaacatggttcattaggaaaaagtgactgaaattctaatcctgtgcaggtccaggattatgagggaagcmaaaagaatgccactgacactagaatagagtatttcctgctgggcatggtggctaatgcctgtaatcccagcactttgggaggtggaggcagtggatcgcttgaacccaggagttcgagatcagcctggccaacatggtgaaaccccatctttactaaaaatacaaaaattagccaggggtggtggctcacgcctgtaatcccagctgctggggaggctgaagcatgagaattgctggaacccagggggcagaggttgcagtgagctgagatggcaccactgcactccagcctgggcgacagagactgtctcaaaaaaaaaaaaaaaatttatgtgctgtcacaactgcaaggcatgaggcctctctccctccctggcgtttccacatggcacttccccttgtgtttgacgtgtcagcctctgtcctcattgcaaatctcctctgccttccagcctcagtctctgtacagactctgccctcctcatcttggctgcagggttgtcaggttctttggccttctcatctcacagccacaggagcgtttgtgaacttgtgatycyccctagttcccggctctggcagtgkgtgcggggaggcctcaacacagccagccccttggttactctactgtgactacctccttttggctccgggctcggtgacctacttccaaataccaaattgcagcatgggacttttctgattttcatttgccccctcaaatctatgaggtttctatgatctctttcatctcttctctttctcgtgagttacaagggagtaggggcgtaccgggtgcctcagaaggaacccaagtagcaatttcaccatagtctcatccctccaaatttctcctaaaaaatattccctcaatccaggatttttactacttccctctgtggagagaaaccccatgtctaacatctgtctcacccaagagcatgctggaaaattctttggcttcaaagtccaaagattgattctggatattgaatgtccagctaagggaaaccaagaaaagacttttctgttttctccttcaggtacctggtccttgaaattgaaacctagacacttatgcctattgtttttcttgtaactttcaaaatctattttgatgtcaaaatggaacaatggtttttttgttatccatcgagttctgcccttctcaagaagtatggatggctcaacctcagcagatggaaagctacagggaaataggaagtaccatctcaaggaaaagaaatgtgcctcattagaaatgtccgatgcattttttgttctcagtcgttcttgcaacccaaggactgagttgcaagtcaaagtgtttatcaatgttaagtttgaaccaaagacaaaaatctctgttgttctttccttcttagtagttcttaaactacttatatattagaacgctgctgtggaggaagaaatatttttagtttttcatacggaaaagttttaagacacacatttccatggagtatatttttcccacagtgttttccaaagcctctgtctttggctcagcatttctccaactggaagtttcaccaatgagtcccctgtgttcctgtggtccgctgtagggctactctggagtctctggcttattagcatgtaaaactcggagattctttccctccagttaaagtcatatccacaggatttacatgaaatatattatatayggcacctttctttgtaaggtagctagaaagtggctttgggaattttttttctgagacgagtctctctccgtcacccaggctggagtgccatggtgcagtctcagctcactacaacctccgcctcccgggctcaagcgattctcctgcctcagcctcctgagtagtggggactacacgcacacaccaccacgcccagctatttttgttgttgttgtttgtttkttttttttttttttgtagttgtttgttttggtagagacggggtttcaccatgtttccgcggctgatctcaaactcctgggctcaagtgatccactgcctccgcctcccaaagtgctgggattacaggcgtgagccaccgtgcccggcaggaaatattctattctagtgtcagtggcattctttttgcttccctcataatcctggacctgcacaggattagaatttcagtcattctttcctaatgaaccatgtktaagttttatcactttgtaatrctctcttattcttctccaaactcagtcttatttccctgtggttttcatttataagggaagaaaagaaaggacgacaagtctatttttagggatccattaaaaattcattttttaatagtccataaacattgcgaagtaacttgggactcatacatacaaattctgattattttaaattgcttcatgtgataattgcaagcatttattgagcatttacacattactgaacttaaaacacataaaaatgccattctcggctgggcgcagtggctcacacttgtaatctcagcactttgggagccaatccaggcaaatggcttgagtccaggagtttgagaccagcctggccatcataatggaaccccatctctaytaaaaatacaaaaatgagccaggtatggtggcatgtgcctgtcatcccagctcctggggaggctgaggtaggaggattgcctgagcctgggaggttgaggttacagtgagccaagattgtgcctgtgcacttcagcctgggcgactggagtgagaccctatcccaaaaaaaaagaaaaagccattctctggcgatcattaaaaagtcaggaaacaacagatgctggagaggatgtggagaaataggaatgcttttacactgttggtgggattgtaaattagttcaaccattgtggaagacagtgtggtgatccctcaaggatc

SEQ ID NO: 1605 - DNA, 93112 bp, Homo sapiens
  misc_feature (1)...(93112): n = A,T,C or G, or insertion/deletion polymorphism (see Tables 1-2)
nnnnnnnnnnnnnnnnnnnnnnnnnnnnnnnnnnnnnnnnnnnnnnnnnnnnnnnnnnnnnnnnnnnnnnnnnnnnnnnnnnnnnnnnnnnnnnnnnnnnnnnnnnnnnnnnnnnnnnnnnnnnnnnnnnnnnnnnnnnnnnnnnnnnnnnnnnnnnnnnnnnnnnnnnnnnnnnnnnnnnnnnnnnnnnnnnnnnnnnnnnnnnnnnnnnnnnnnnnnnnnnnnnnnnnnnnnnnnnnnnnnnnnnnnnnnnnnnnnnnnnnnnnnnnnnnnnnnnnnnnnnnnnnnnnnnnnnnnnnnnnnnnnnnnnnnnnnnnnnnnnnnnnnnnnnnnnnnnnnnnnnnnnnnnnnnnnnnnnnnnnnnnnnnnnnnnnnnnnnnnnnnnnnnnnnnnnnnnnnnnnnnnnnnnnnnnnnnnnnnnnnnnnnnnnnnnnnnnnnnnnnnnnnnnnnnnnnnnnnnnnnnnnnnnnnnnnnnnnnnnnnnnnnnnnnnnnnnnnnnnnnnnnnnnnnnnnnnnnnnnnnnnnnnnnnnnnnnnnnnnnnnnnnnnnnnnnnnnnnnnnnnnnnnnnnnnnnnnnnnnnnnnnnnnnnnnnnnnnnnnnnnnnnnnnnnnnnnnnnnnnnnnnnnnnnnnnnnnnnnnnnnnnnnnnnnnnnnnnnnnnnnnnnnnnnnnnnnnnnnnnnnnnnnnnnnnnnnnnnnnnnnnnnnnnnnnnnnnnnnnnnnnnnnnnnnnnnnnnnnnnnnnnnnnnnnnnnnnnnnnnnnnnnnnnnnnnnnnnnnnnnnnnnnnnnnnnnnnnnnnnnnnnnnnnnnnnnnnnnnnnnnnnnnnnnnnnnnnnnnnnnnnnnnnnnnnnnnnnnnnnnnnnnnnnnnnnnnnnnnnnnnnnnnnnnnnnnnnnnnnnnnnnnnnnnnnnnnnnnnnnnnnnnnnnnnnnnnnnnnnnnnnnnnnnnnnnnnnnnnnnnnnnnnnnnnnnnnnnnnnnnnnnnnnnnnnnnnnnnnnnnnnnnnnnnnnnnnnnnnnnnnnnnnnnnnnnnnnnnnnnnnnnnnnnnnnnnnnnnnnnnnnnnnnnnnnnnnnnnnnnnnnnnnnnnnnnnnnnnnnnnnnnnnnnnnnnnnnnnnnnnnnnnnnnnnnnnnnnnnnnnnnnnnnnnnnnnnnnnnnnnnnnnnnnnnnnnnnnnnnnnnnnnnnnnnnnnnnnnnnnnnnnnnnnnnnnnnnnnnnnnnnnnnnnnnnnnnnnnnnnnnnnnnnnnnnnnnnnnnnnnnnnnnnnnnnnnnnnnnnnnnnnnnnnnnnnnnnnnnnnnnnnnnnnnnnnnnnnnnnnnnnnnnnnnnnnnnnnnnnnnnnnnnnnnnnnnnnnnnnnnnnnnnnnnnnnnnnnnnnnnnnnnnnnnnnnnnnnnnnnnnnnnnnnnnnnnnnnnnnnnnnnnnnnnnnnnnnnnnnnnnnnnnnnnnnnnnnnnnnnnnnnnnnnnnnnnnnnnnnnnnnnnnnnnnnnnnnnnnnnnnnnnnnnnnnnnnnnnnnnnnnnnnnnnnnnnnnnnnnnnnnnnnnnnnnnnnnnnnnnnnnnnnnnnnnnnnnnnnnnnnnnnnnnnnnnnnnnnnnnnnnnnnnnnnnnnnnnnnnnnnnnnnnnnnnnnnnnnnnnnnnnnnnnnnnnnnnnnnnnnnnnnnnnnnnnnnnnnnnnnnnnnnnnnnnnnnnnnnnnnnnnnnnnnnnnnnnnnnnnnnnnnnnnnnnnnnnnnnnnnnnnnnnnnnnnnnnnnnnnnnnnnnnnnnnnnnnnnnnnnnnnnnnnnnnnnnnnnnnnnnnnnnnnnnnnnnnnnnnnnnnnnnnnnnnnnnnnnnnnnnnnnnnnnnnnnnnnnnnnnnnnnnnnnnnnnnnnnnnnnnnnnnnnnnnnnnnnnnnnnnnnnnnnnnnnnnnnnnnnnnnnnnnnnnnnnnnnnnnnnnnnnnnnnnnnnnnnnnnnnnnnnnnnnnnnnnnnnnnnnnnnnnnnnnnnnnnnnnnnnnnnnnnnnnnnnnnnnnnnnnnnnnnnnnnnnnnnnnnnnnnnnnnnnnnnnnnnnnnnnnnnnnnnnnnnnnnnnnnnnnnnnnnnnnnnnnnnnnnnnnnnnnnnnnnnnnnnnnnnnnnnnnnnnnnnnnnnnnnnnnnnnnnnnnnnnnnnnnnnnnnnnnnnnnnnnnnnnnnnnnnnnnnnnnnnnnnnnnnnnnnnnnnnnnnnnnnnnnnnnnnnnnnnnnnnnnnnnnnnnnnnnnnnnnnnnnnnnnnnnnnnnnnnnnnnnnnnnnnnnnnnnnnnnnnnnnnnnnnnnnnnnnnnnnnnnnnnnnnnnnnnnnnnnnnnnnnnnnnnnnnnnnnnnnnnnnnnnnnnnnnnnnnnnnnnnnnnnnnnnnnnnnnnnnnnnnnnnnnnnnnnnnnnnnnnnnnnnnnnnnnnnnnnnnnnnnnnnnnnnnnnnnnnnnnnnnnnnnnnnnnnnnnnnnnnnnnnnnnnnnnnnnnnnnnnnnnnnnnnnnnnnnnnnnnnnnnnnnnnnnnnnnnnnnnnnnnnnnnnnnnnnnnnnnnnnnnnnnnnnnnnnnnnnnnnnnnnnnnnnnnnnnnnnnnnnnnnnnnnnnnnnnnnnnnnnnnnnnnnnnnnnnnnnnnnnnnnnnnnnnnnnnnnnnnnnnnnnnnnnnnnnnnnnnnnnnnnnnnnnnnnnnnnnnnnnnnnnnnnnnnnnnnnnnnnnnnnnnnnnnnnnnnnnnnnnnnnnnnnnnnnnnnnnnnnnnnnnnnnnnnnnnnnnnnnnnnnnnnnnnnnnnnnnnnnnnnnnnnnnnnnnnnnnnnnnnnnnnnnnnnnnnnnnnnnnnnnnnnnnnnnnnnnnnnnnnnnnnnnnnnnnnnnnnnnnnnnnnnnnnnnnnnnnnnnnnnnnnnnnnnnnnnnnnnnnnnnnnnnnnnnnnnnnnnnnnnnnnnnnnnnnnnnnnnnnnnnnnnnnnnnnnnnnnnnnnnnnnnnnnnnnnnnnnnnnnnnnnnnnnnnnnnnnnnnnnnnnnnnnnnnnnnnnnnnnnnnnnnnnnnnnnnnnnnnnnnnnnnnnnnnnnnnnnnnnnnnnnnnnnnnnnnnnnnnnnnnnnnnnnnnnnnnnnnnnnnnnnnnnnnnnnnnnnnnnnnnnnnnnnnnnnnnnnnnnnnnnnnnnnnnnnnnnnnnnnnnnnnnnnnnnnnnnnnnnnnnnnnnnnnnnnnnnnnnnnnnnnnnnnnnnnnnnnnnnnnnnnnnnnnnnnnnnnnnnnnnnnnnnnnnnnnnnnnnnnnnnnnnnnnnnnnnnnnnnnnnnnnnnnnnnnnnnnnnnnnnnnnnnnnnnnnnnnnnnnnnnnnnnnnnnnnnnnnnnnnnnnnnnnnnnnnnnnnnnnnnnnnnnnnnnnnnnnnnnnnnnnnnnnnnnnnnnnnnnnnnnnnnnnnnnnnnnnnnnnnnnnnnnnnnnnnnnnnnnnnnnnnnnnnnnnnnnnnnnnnnnnnnnnnnnnnnnnnnnnnnnnnnnnnnnnnnnnnnnnnnnnnnnnnnnnnnnnnnnnnnnnnnnnnnnnnnnnnnnnnnnnnnnnnnnnnnnnnnnnnnnnnnnnnnnnnnnnnnnnnnnnnnnnnnnnnnnnnnnnnnnnnnnnnnnnnnnnnnnnnnnnnnnnnnnnnnnnnnnnnnnnnnnnnnnnnnnnnnnnnnnnnnnnnnnnnnnnnnnnnnnnnnnnnnnnnnnnnnnnnnnnnnnnnnnnnnnnnnnnnnnnnnnnnnnnnnnnnnnnnnnnnnnnnnnnnnnnnnnnnnnnnnnnnnnnnnnnnnnnnnnnnnnnnnnnnnnnnnnnnnnnnnnnnnnnnnnnnnnnnnnnnnnnnnnnnnnnnnnnnnnnnnnnnnnnnnnnnnnnnnnnnnnnnnnnnnnnnnnnnnnnnnnnnnnnnnnnnnnnnnnnnnnnnnnnnnnnnnnnnnnnnnnnnnnnnnnnnnnnnnnnnnnnnnnnnnnnnnnnnnnnnnnnnnnnnnnnnnnnnnnnnnnnnnnnnnnnnnnnnnnnnnnnnnnnnnnnnnnnnnnnnnnnnnnnnnnnnnnnnnnnnnnnnnnnnnnnnnnnnnnnnnnnnnnnnnnnnnnnnnnnnnnnnnnnnnnnnnnnnnnnnnnnnnnnnnnnnnnnnnnnnnnnnnnnnnnnnnnnnnnnnnnnnnnnnnnnnnnnnnnnnnnnnnnnnnnnnnnnnnnnnnnnnnnnnnnnnnnnnnnnnnnnnnnnnnnnnnnnnnnnnnnnnnnnnnnnnnnnnnnnnnnnnnnnnnnnnnnnnnnnnnnnnnnnnnnnnnnnnnnnnnnnnnnnnnnnnnnnnnnnnnnnnnnnnnnnnnnnnnnnnnnnnnnnnnnnnnnnnnnnnnnnnnnnnnnnnnnnnnnnnnnnnnnnnnnnnnnnnnnnnnnnnnnnnnnnnnnnnnnnnnnnnnnnnnnnnnnnnnnnnnnnnnnnnnnnnnnnnnnnnnnnnnnnnnnnnnnnnnnnnnnnnnnnnnnnnnnnnnnnnnnnnnnnnnnnnnnnnnnnnnnnnnnnnnnnnnnnnnnnnnnnnnnnnnnnnnnnnnnnnnnnnnnnnnnnnnnnnnnnnnnnnnnnnnnnnnnnnnnnnnnnnnnnnnnnnnnnnnnnnnnnnnnnnnnnnnnnnnnnnnnnnnnnnnnnnnnnnnnnnnnnnnnnnnnnnnnnnnnnnnnnnnnnnnnnnnnnnnnnnnnnnnnnnnnnnnnnnnnnnnnnnnnnnnnnnnnnnnnnnnnnnnnnnnnnnnnnnnnnnnnnnnnnnnnnnnnnnnnnnnnnnnnnnnnnnnnnnnnnnnnnnnnnnnnnnnnnnnnnnnnnnnnnnnnnnnnnnnnnnnnnnnnnnnnnnnnnnnnnnnnnnnnnnnnnnnnnnnnnnnnnnnnnnnnnnnnnnnnnnnnnnnnnnnnnnnnnnnnnnnnnnnnnnnnnnnnnnnnnnnnnnnnnnnnnnnnnnnnnnnnnnnnnnnnnnnnnnnnnnnnnnnnnnnnnnnnnnnnnnnnnnnnnnnnnnnnnnnnnnnnnnnnnnnnnnnnnnnnnnnnnnnnnnnnnnnnnnnnnnnnnnnnnnnnnnnnnnnnnnnnnnnnnnnnnnnnnnnnnnnnnnnnnnnnnnnnnnnnnnnnnnnnnnnnnnnnnnnnnnnnnnnnnnnnnnnnnnnnnnnnnnnnnnnnnnnnnnnnnnnnnnnnnnnnnnnnnnnnnnnnnnnnnnnnnnnnnnnnnnnnnnnnnnnnnnnnnnnnnnnnnnnnnnnnnnnnnnnnnnnnnnnnnnnnnnnnnnnnnnnnnnnnnnnnnnnnnnnnnnnnnnnnnnnnnnnnnnnnnnnnnnnnnnnnnnnnnnnnnnnnnnnnnnnnnnnnnnnnnnnnnnnnnnnnnnnnnnnnnnnnnnnnnnnnnnnnnnnnnnnnnnnnnnnnnnnnnnnnnnnnnnnnnnnnnnnnnnnnnnnnnnnnnnnnnnnnnnnnnnnnnnnnnnnnnnnnnnnnnnnnnnnnnnnnnnnnnnnnnnnnnnnnnnnnnnnnnnnnnnnnnnnnnnnnnnnnnnnnnnnnnnnnnnnnnnnnnnnnnnnnnnnnnnnnnnnnnnnnnnnnnnnnnnnnnnnnnnnnnnnnnnnnnnnnnnnnnnnnnnnnnnnnnnnnnnnnnnnnnnnnnnnnnnnnnnnnnnnnnnnnnnnnnnnnnnnnnnnnnnnnnnnnnnnnnnnnnnnnnnnnnnnnnnnnnnnnnnnnnnnnnnnnnnnnnnnnnnnnnnnnnnnnnnnnnnnnnnnnnnnnnnnnnnnnnnnnnnnnnnnnnnnnnnnnnnnnnnnnnnnnnnnnnnnnnnnnnnnnnnnnnattagtgatcgagagccatttttgctggtggcaatcatatggtacttttaatgggaatattagaaaggcaccggtaatgaccttgttgcagcacaaaggagagagtgtggggtgcccctgcatgttgtcccacctcttgtgacgtgtatcgttttggaatttccagtggcttgatcatgaactactgcaggaatccagatgctgtggcagctccttattgttatacgagggatcccggtgtcaggtgggagtactgcaacctgacgcaatgctcagacgcagaagggactgccgtcgcgcctccgactgttaccccggttccaagcctagaggctccttccgaacaaggtaaggagtctgtggccagacatctacacgcttcsatgctggratgaaaagccatggaaattcccactgatgcagccgccttcaatgktaaacggatgctcgagtgttgcctgagttctaccatgttgggggaagcctccgtgtactctctgggggagccagcggagtgatttctggtgcaacgtggttgggctttgtctttagaatgggcacaaaccctccagggtgatcgacttcacaattcaccttgttctaaaatgggctacctcagtgtcccagccaaaatttttattgtaacgtgctgtcaggtgtgtgactctttcagtccagtaagsttttccggggatttcttcaagtagccagcaktcagwgcartcttcagcattgcagattcagagaaatgtggctctggagcctgtcatcctcgagaaacctaacagggctgcattaattccatatggtcctgggtctatggagcagtayatgagctcccaatgctctaaggctcttcagtcctaggctttgaagggagtgatttctcagtgttcttaaacctctttctgatggcacttgtacctgtgaggggtctagagagaaaggttagtagacttctcctttactgcaattcaggatgcagggcatgagaggattccctccctcstccaagggaagaaggttttggcgtgcacacatccttgagaagcaaagtgtctttgccttcagtcagatatataggatcgttttctgccccatggcctggaagccagaggcyttggctttcatgatcaacgatctagggaaacatgcaaaatttccrtgtctttcccctcctctgcccycgacagccaattaccacctgcatcctgcattgccaaatgcagtgccctttgtatgaacattcagtakagtttcatagaaaggtgctacttcgtgagcgcactttgcagtgagaagatctgttctgttctgtttttctaaggatttcaggtgaaatatttcctagaacttactacagttctagattggtaggaatctgtrggtttgctgtatgttttttggttggttttctcccatccatctgcctacaggtaagggaaagataamgttcrtaattctcatagactcctttctggttktgtcataratgkcttcacatatttcgttattctcagagatactcagtttatttcttgtgttttcatttcagcaccgactgagcagaggcctggggtgcaggagtgctaccacggtaatggacagagttatcgaggcacatactccaccactgtcacyggaagaacctgccaagcttggtcatctatgacaccacactcgcatagtcggaccccagaatactacccaaatgcgtatgtctttgttctttaccataagagaataaagggccaactgaagtttctgtgacaagagacatgcttcaagctgagttctccgaactcaacttgtgtcagattcagatggygtagcaaaatgtctcaggatgatttccttggagctaagggtctgagagaagagaaatgttaagctgcctcaccttcctcctagttttgtggagcagaagggaaatgaggaggcgaggagatcaccttatgaagaaagtcagaatgacraacsaccaaacacttagattacccttgcccaacacccactaagcgtcaatgaagactttccagttggaattccgttattctgacttccaattcctgaagggaagattgtgtttgccttttctgtctgggctcatgaggaaagtttatgtgcttacttatggacaggtgaattgatctgtttctatttctacctgtattccaatagggagaaaatctcttggtcctaagtaccagtggcctgaarggatagaggttcccagcaagagaagatccaaggaaggaaggcagatgagagtcagcacagagagkgatgctgaaaagtaaaagggatgggtagatggatagaagccctggyctgaccaccccatggccaatcatttggccataatcaacaaccaaagacatggaaaaatggtttctacatgtgggacaacagatsgtagaggacctagagaattgagagagggccaatgatgagctcaactccatagatgccttggctttcttcctggatacccttcctgcactgartagcaaggagatggagctcaagcagcctgtagccatctagctgagcagaggagagggattggagtttgggatgactctggtatwttctaggtccgctacaaataagaactggtttgtggaggaaaggagctctacaaatacgcatagaagtctcctccagtagytggcctcacatgacactgcatgtgcacagaaaatggttctacagaaagtgtggcaaagaacatttactgagaaacagcaactacaagagaacagcaagctcaattaagaagatagagatcacatagcactctgtgttattggagttcttaccagctagatgagagagtgctcacggaacacattgccaattcagtggagaccccagaacagccataatttcaaagtacaattagtatattactagaataaaggcagctgcagacaaccccttgcacagctgaaaagcaagtgtccaagcatcaaatgggtttccaatcaatgaagtgcctgtgagaggaaatctcaactctcttcagaagtaaacaacaaagtcaattgcctcarctatgcggtatccccagagtgagtcctaaattaaaaatttgactacgtgtagaaaagaatttcgtgtgatccatgaccagraaataaatcaggcaatacaaacaggctcagaaatgacatcgataattagaattgcatgaaaatttgacatatcagtatgataactgatttcagatatttaaaaaaagtgcaacaaagcaggtatcatatcaagacaaattaatagtatagaatagccaaatcaaattaaagaactattatacaaaaagtatgtcttaaatgaagaaattactgtatgtccgcctgaaaaatttagatgtttcagaagaaaaaattaaccaaaaacaattctgcagaacctacagaatgagcyacacacacacacattcaaaacacacccatacacacacacatgcaaaaactcacaagttctaacacacacacaaacacacacacacatgcacatccctaaagaaatagggaaatataaaattaaccgaccctcagagacatgcaggaaaatataagaagatttcctgcatgtgggaagcaagtcacagtaaagagcaagggagtttggagtagatacaaataccggaatcacggatggctgataacttttcaattatgaagaacgttagaaaaatcacagattcatgaaactaaagggatcaaataggaaatttcgagaaaaaaaactacatgatgcacttctctacatcacagttcaaaggtaacaaggcaaggatataagaagaagaaacatctcacgagaaactggagraaaaagagctgtgtcttcctagagtacagtgatacaaattgctaatgcgttcacctcagaaacactggaagccagataccagggaatattattaaaatgataatgaggaacaagaagagatcaaccgagaatgctgaatccagcaataaaatgccttgaagatcatccatgttggataaatgcatattgtgcactgcccaaaacaaagaaactggaaagtgtaagactttggaatcagcaggcttatgtagcaacagaggtgacccraaagaattaggtataagaagaatagaagaattgcatgaaaatttgacatatgactaagataactatttcaawtatttaaaaaaagatgaatatgtaataaaacagataaaatatcaaaagaaagtaacagtattgactagccaaatcaaattaaagacttagtgtaaaaagctatgtcttaaaagaaaaaattactggatggctgcctgatcaatttagacatttctgaataggaaactaaccaaaaatcaattctacagaaccaactacacacatatatacacatacaacacacccatacacacccacgcaaaaactcacaagttcacacacacacacacacacacacacacaaccctcaagaaatagtgaaatagaaaaccaaccgaacctcacagacatgttgcaaaataggaaaagatttcctgcatatgggaagcaagtcacagaaaagagaacgggagattggaaacagaarcaaataccggaatcaaggatggccgaaaacttttcattgatcaagaatattaacaaaatcgcaaaaacacgaaattcaatgcatcaaataggcgtttcgaaaaaaagaaaaaatctggtatgatgcacttttgtacttcacattttcacggtaagaagacaaagatataataacaagaaacttcttatgagaaactggggaaaaacaagctgtttcttgctagaagaacagtgatacaaattgctaatgcattctcgtcaaaaacactggaagccagataccgggaatgttattaatgtggtaaacaggaacaagaagagatcaaccaagaatgctaaatccagcaataaaatgccttgaagatcatccatgctgcataaatgtatgttgtgcactgccccaaacaaagaaaccggaaactgtaagaatttggaatcagcaggctgatgtaacaagagaggtgacccaaaggaattaggtagaagaagaatagtacaagaagggaactttctgcagcccatgtaatgaagaacccagcaattggcaaatgtagatgtaaatgcaaaagtattttcttgaccaaatttctatatatttttaaatgagcgttgactactggaaacaaaatgagagcaagagatttaattttagcctcggtagaggtaagaatttgaacaagtagcgtaaatcatgtagggaataattagaagtgtaccattgtaagtttcttacctcatgcacaatggtatgtaatattaataaaatgttactgtgtgggttcaaggagatattgcaaatcctagagcaatcacaaagttttsaactctgaggtatattgtataataagaatattccatgtattcaaaagagagaagccaaggaagaaagaaatttgtcacgagtttgggctcttagtacatcctgtagctcattgaaccagcttcctggaatggagggtctgggattgacactaggccacatgtatagagtctctagagagacagtgtttcatccccatggcycgtaatacatttcccattttctcaggcagccacaggtcaygaatgtgaggatagagagaggttggagcaacgttcttgggaggcataaggaagagcaaatgcttcaagatccccgcagcccaaactcctacctgctttgccccctaatgcagtgttcctccgtagctgtccgacctcttcagatctcttagtctaccctgccatcttcctttatgccatgggtcccactgttctttcaactcatcccccttwccctcagtgcagagtagctgcggccagcagagggtagactgagagcaggagagaaggtcctgcccaggaacccattctagagatgctgcattctgcctgggagcaagttttccagggcagctttgagaagtcttgcagaaacaaacctatttgacccacatgatatgggaatgacagaaagtaatacaatttgcacagtgcttttccatgggaaaagtagagccttttcgcgaggttttgagtacatagagagtgaaggttgacctggaaaggttatcctcctggatcccatgttttttctgaagaactacctgttagttgcaacttgcacattagaatatgaagtcctaccgagagagatacggagaactagataaatacagatacttttgtatgtgaataaacgattccacaatacacacatcaaaatccataccagttattccagagagatggattgggcagaaggcagaaggagaatactctgatcgttttttgcccacgtgtatgtattatctcagtgtttctaagaagcgtttgctactttagatttttttttataataataatcttttaagtatgagaaatgtgcagacaggattagtgattgagagccatttgtgcttstggcaatcatatggtacttttatgggaatattagaaaggcactggtaatgaccttgttgcagcacaaaggagagggtgtggggtgcccctgcatattgtcccacctcttgtgacgtgtatcgttttggaatttccagtggcttgatcatgaactactgcaggaatccagatcctgtggcagccccttattgttatacgagggatcccagtgtcaggtgggagtactgcaacctgacacaatgctcagacgcagaagggactgccgtcgcgcctccaactattaccccgattccaagcctagaggctccttctgaacaaggtaaggagcctgtggccagaaacctacacgtttcgatgctgggatgaaaagccatggaaattcccactgatgcagcagcctccaayggtaaacggatgctcgagtgttgactgagttctgtcatgtaggaggaagcctccgtgcactctctgggggagccagcggattgatttctggtrcaacgttgggtgggctgtgtctttagaattggcacaaaccctccagggtgatcgacttcacaactcacctcgttgaaaaatgggctatctcagtgtcttagccaaaatttttattgtaacatgctgtcagatgtgtgactctttccaagccagtaagcttttcctgggacttcttcaattagccagcattcagtgcaatcttcagcattgcagattcagagaaatgtggctctggagcctgtcacccttgagaaacagggctaacagggttgcattaattccaaatcaccctggttctatggagcagtacatgaactcccaatgatctatgtttcaggacttcctcagtcataggtgggctctgcagccctaggtttttaagtgagtgactgccccgtgttctggtggcagttgtacctgtgagcggtctggatagaaagagtcggagacttctgtattattgcaactcaggatgtgggtcatgagaggatttcatctctcctgcaggggagtaagctgttcgcctccacccatccctgataactgaagtgtctttgtctgcagtyctagacgaaggactgttgtctctcccatggcccagaagctgaagaccttgccttttgttatgaaacgttcattgttttcatgtctgtccgtttctctgcccctaacacccaatcaccatgtatggcctgtacccccaaatgcatcgtgctttgctgtttgctgccccatagtcctcatgaacattcagtagaaattcccataaatgtgcttgcacgtgagcacagtttccattgagaagccctctcatytgtcctttttttctaagcttttatgtgaaatatttctaagaacttactacagttctaaartgttaggaatttgtttctttggtgtttttgtttgttggttggttgttgcttttctcaagtccatctgcctacaaataaagaaacaagaatgttacttgtcatattctcctgaggtcataattctcagagacttttttctggtttgtgccataagtggcttcacatgtttgtctcttcttggaaacactcagtttgatttcttttcttttcatttcagcaccaactgagcaaaggcctggggtgcaggagtgctaccacggaaatggacagagttatcaaggcacatacttcattactgtcacaggaagaacctgccaagcttggtcatctatgacaccacactcgcatagtcggaccccagcatactacccaaatgcgtatgtctattttctttaccataagtgaaggaagggtcagtggaaatttctgttagtagagtcatgcttcaagctgagtgttcaggactcaagttgtctcagatgaacagtgcatagcaaaatgtctcaggaacattgtctttgagcaaagagtctaagagaagacaaatgttaatctggctctccttcctcctagtttaatggagcagaaaggtatctggaggcaaggatatcacattaagaaacaagtcaagatgacaaatgatgaaactcttagagtacccttccacaacacccactaaggttcaatgcagccttttctccttggaattctattaaactaaactccaattcctgaagtgaaggttctgttggggttttctgttttggcttacaaggaaagtatatatgtatatctatggagaggcaaatctatctctttctatatctacgtctattccaatatgtagaaacacagtcggttctgaccaccagtggtctgaagggatactggttgttagagaataaaartggcaggaaggcagatgagagtcagcaaagagagagatcctgtaaagtaaaagggtggatagatggacagaagcccaggtctgaccagcccatggccaggctttmggccataagtgacaccaaagacatggaaaaatggtttctacatgttggacaacagacagtagtggaccaaaagaatagtgacagggggaacaatgagatcaactccatagataccttggctttcttcctggaggcccttcttgcactgaagagyaaggtgatggagcccagatggactgtagccatcttcctgaatgcaggagagagattggaatttgggactactgtggtagctaggattttataggcctgctgagaatgagaatggatttgtggatgaaaggagctccaggggcacgcatagtagtctcctcgaatctttggctaaacatgacgttgcatgtgcccagaaaaaggttccacaagaaagtagagaaaagaatatatcctgaggaatagcaactgcgattgaacagtgagctcaataaagaggacagagccctcatagcattctgggatactggagttctgaccagctggaggagagacctcactgaacctcttgggaatacagtagagactccagaaaagtcatactttaggagtagaattagtaaatttctagaaaaaaaggcagctctagacaaaccctgrcaaaactgaaaagcaagtctccaagcattaaaatcatttccaagtcaattaactgcctgggagaggaaaaccctctttagaggtaaacaacaaagtcaagtggctcagctatgtggtgttcacagtgtgagttctaaatttaaaacttgactacacatagagaagcttttagtatgaaccatgaccaggtgaaaaatcagtcaatacaaatagacctagaaatgacagaaatgattagaatggcaaaaaatttgacatatcaatatgtcaactgagttttaggttttaagaaaacatgaatacggaatgaagcagataccatatcaagagacagtaacagtatagaagagccaaattaaattaaagaactagtataagaaggtatgtcttaaatgaaaaaattactggatgtattcccaatggagtgagatgtttcagaagtaaaaactaactgaaaaacaattttataccacctacagaaccagctacacatacacaaatgacacacacatatacacacatactcacacatgcacaggcttagaaacatgcacrcacacacacacacacacacacacacacctccacaaatactaaaaaatgaaatccactgatcctcacagacaggcgggaaaatataaaaagatttcctgcatgtgggtaggaagtcacagaasgagaggaaggagagattgctacaggaacaaatactggaagcaaggatagctaaaaacttttcaaataagaagaatattaaaaaccacagattcaagaagctgaatgaatcagacagggaatttccaaaaaaaaaaaaaaaaaactgtatgattcacttttgtacatcaccgttcaacagtcagaaggcaaagatataataacaagaaacatctcatgagaaactggaggaaaaagagctgtgtcttgctagaagaacagtgatacaaattgctaatgcattctcatcagaaacactggaacccagttaacaggggatatcattaaaatgataaactagaaaaaaaagagatcaaatgagaatgctacatccagcaataaaatgccttgaagatcatccatgttggataaatgcatattgtgcactgccccaaataaataaaccaaaaactaataatttggaatcagcaggcttgtgtaacaagagatgttgcccaaagaaaattagctagaagaagaatagttcaagaggagaactttctgcagcccacrtaatgaagaacccagcaaatggcaaatgtagatgtaaatgcaaaatattttcttgatcaaatttctatatctttttaaatgagagttgactacttgaagcaaaatgatagcaatatatttaactttagmatatgtagaggtaaaaatttgaacatatarmctaaatcatgtggggaataattggaagtgtaccattgtaagtttcttaccttatccaygatggtatgtaatattaatgaaaggttgaatttgtgggtccaaagggatattgtaaatcctaaagcaatcataaaattttgaattctgagggatattatataataagaattttccatgtatccaaaagagggaagccaaggaagaaaaagaagtctttcaagtactcaagctctgagcacatccagttgctcwttgaaccagcttcctggaatggagggtctgggcttgagactagstcacatgtgtagagtctctagagagacagtgttggatccccatggcccataatacatttcccgttttcccaggcagccacaggtcacgaatgggaggattctgagaggttggagcaatgttcttaggaggcataaggaggagtgaatgctctgagatttccccagcctgaggtcctccatagctgcccgacctcttcagacctcatagtctgcccagctgtctccctttatgccatgagtgccactgttctttcaactcatcccccattccctcagtcccggaattgctgtggccagcagaggatrgactgagagcaggagaggaagtcctgaccaggaacccatcctagagatactgcatcctgcctgaaagctaggtttccagggcagctttgagaagtcttgcagaaagaaacccacttgacccacctgatacggtatcgacagacaggaatactttttgtgcaatggttttacatgctgaacatagagccttttggctacattttgagtacattgaatgagactgctggcctgggaaggatatcatgctggatgccatttttttctctggagaactatgtgttagttccaactcgcacattactatatgaagtcctacacagagagatacggagagctagacagatagagatacttttgtatgtgcataaccaattccacaatacacacgtcaaaatccataccagttattccagagagatggattgggcagaaggcrgaaggaggatattctgatccctttttggccacatgtatgtataatctcagtgtttctaggaagtgtgtgctgcattagattttttttctttaaaaaaagtgataatatattaagtatgagaaatgtgcagagaggattagagattgagagccatttgtcattgtggcaattgtatggtatctcttttgggaatatttcaaaggcaccagtaatgaccttgttgtagcaaaatatacagtgttcctgcatatgtacccattttttgtgatgtgtattcttttggaatttccagtggcttgatcaagaactactgccgaaatccagatcctgtggcagccccttggtgttatacaacagatcccagtgtcaggtgggagtactgcaacctgacacgatgctcagatgcagaatggactgccttcgtccctccgaatgttattctggctccaagcctagaggctttttttgaacaaggtaagaagttgtgccagacatttacctgcttggatgctgggatgaaaagccatggatacccccactgacgcacaasccttcagtgctacactggttctcgtgtgttggttctgggtctgccatgtgggaggaagccttagcgcactctctgggggagccagaggtgtgatttttggtgcaacctgtgcgagctgtgtctttaggatgggcggaaaccattctgggtgctcgacttcaccactcccctcattgtaaaaggggctatctcattgtcctagacaaaattcttattgtaatatgctgtcagatgtgtgtgtctttccaagccagtaaacttttccagggatttcttcaagtagacagcattcagtgcaatcttcagcattgcagattccgagaaatgtggctctaratcctgttatccttgagaaacctaactgggttgcattaattccatatctccctgggtctgtggagtagtacatgagctcccgaagctctatctctcaggtctttttcagtccgaggcaggttgtgcagttcttagctttgaagggagtgattttttcgtgtgcttttgcctctttctgatggaacttgtacctgcggggggtctggagaaaaagagtagtagacttttgctttattgcaatgcattatgctgggcacgagaggattccctatcttattgtaggtgataagcttttggcctccactcatccctgagaagtgaagtgttgttgcctacagttttagctgcaggactgttgtctgccccatcaccaggagtttaatgctttcttttttgagcaatcatctagggacacatgcaaggtttttatatgtccttgcctcctccccaaaaaaccattttaatgcttggagacttgcttttcagctttgccaaatgcatcaccctttcttctatgctgttccatgtcrtcatgaacactctgtagagattcctagaaatgagcttccatgttagtggagtttccgatgagaagcaatctgatatttcttttccactaagttktacrtgaaatatttctaagaacttactacagttctagaatggtaggcatctcttactttcgtgtttgtttgtgtgttttctcatgtccatttgcctattaataaagaatagagaatggttgtaaatctcagtgactcttttttggtttatgtcataaatggcttcctgtatttttctgttctaggaaataataagcttgatgtcttctgttttaatttcagcactgactgaggaaacccccggggtacaggactgctactaccattatggacagagttaccgaggcacatactccaccactgtcacaggaagaacttgccaagcttggtcatctatgacaccacaccagcatagtcggaccccagaaaactacccaaatgcgtacgtctttgttctttaccataagcraaggaagggccaatggaagtttctgttagaagagtcatgcttcaaggtgactgctcaggactcaacttggctcagatgcagaggaacatttcctgtgagcmaaagttcttagagaakactttgtttttttgagacagagtcttgctttgttgcccaggctggagtgcagtggcatgatctcggctcactgcaagctccgcctcccgggttcacaccattctcctgcttcagcctctctagcagctgggactacaggcacccaccaccacacccggctaattttttgtatttttagtagagacagggtttcactgttctagccaggatggtcttggtctcctgacctygtgatccgcctgcctcagcctcccaaagtgctgggattacaggcgtgagccaccgtgcctggctgagaagacattttttaagctggctctccttcctcctagttttatgkaagcagaaggatatatggagttgagaagatcttattaataaaacagccgggatgacaaatgaccaaagagttagagtatccttctacaacatcggctgagggttaatacaaccttttcaccttggaattctatcattctaagctctagtccctgaagtgaatgttgtgttggccttttgcaycttgggtcacagggaattgatacttgcacatctatggagaggcaaatctttttctatctacttctttttcaatgggtacaaacacacttggtcctgagcaccagtggtctgaagagatacggtctgcccagaggagaagaacaaaggcaggaaagcagatgagagtcagcaaaggggcgatgctgaaaagtaaaaggggcgggtagatggacagaagccatgatctggccattctatggccagtctttcggccataagtgactaccaaagacacggcaaaacggtttccacatgttgaacaacagatgctagaggaccaagagtattgcaagagggagaaaatgagatcaacccatcaatgccttggctttcttcaaggagacccttcctgcactgaagagcaaggagatggagcccaagctgactgtagccatgttgctgaacagaggagagtgattggactttgggattactcaggtagttaggattttctagccatgctaagagtaagaatggacttgtggaggataggagctccaggcatagaagtctcctcaagtgttagtctaaacataaagcagcacttgcatagaagattttccacaagaaaatatggcaaaaaaacaccatatattgaggaacaacaactacaagggaacagtgagcttaataaaggtgacagagctcacatagtgctctggaatattggagttttgaccagctagagrgaagagacctcattgaaaatcttgggcattcagtagagacctcagaaaagtcagactttatgagtagactttgtatattcctagaataaaggcagctccagaaaaaacctagcaaagctgaaaagcaaatctccaagcattaaaatggtgtcctagtcaattaactgccttctagaagaaaactcaacactctttacaggtgaacaacaaagttaagttgctgagctatgcaatatccacagtgtgagtcctaaatttataactttactacacataaaaaagcatttagtgtgaaccataaccaggaaaataatcagtcaataaaaatagaaccaggaatgatagaaatgatttaaatggcatgagaatttgacatattagtatcataactgcattgctggatttaagaaaacataaacatggaacgtaacagatatcatatcaagggaaagtaaaaggataaaagagtcaaatcaaattaaaggactattaaaaggtatatcttaaatgaaaaattcactggatggtctcccaatcaggttagttgtttccagggaaaaaattaactgaaaaataattcaatagaatctacagaaatagctgcacatatatacacacaatggcacacgtgcacacacccacacccacacaggtgtgaatcctagagccacacsagcattgaaacatagagaagtaaaaattgttcattgaggaatatgtagcaatgctcaatgtgttttaccctaataagagcttttgtgatgtatgattgaaaaactgacacaactgaagagagaaatagataagcccacactctgagttagagatttccttgattctctcactatggttataaatctttcccaaacacaacaggctagaacaaatatgcagaaaattagacatagtatctttgttctcaataaaaacgtcgacctatttaacattataccgaactaccgartacacattaaagtgtgcatggagcattcactgaggtgtactctacacatgaccttccagcaagtctccatagatttaaaagaattaaagtcatacagagtgtgtcactttattctcccagaataaagtgagatatgaataatgagaagtttgccagcttctcaaatatttgggagtcatayggtgcatttcaaaatactctttgggacaaagaaaacatcactaaggaatttagaaaagttttgaactgagtaagaatataacacaatttatccaaacttaggagatgcagtgaatgtctttaggcttttacataattttagatgctcttagggaaaaacagaagcatgtaataatcaagatttcaaactgcaattctcaaagtgtagtctagagaaacctgaggacctttgagtaccttcagagacagtccatgaggttaaaggactttgctacgtgaaaagtaagatgctattggccctttttactttcattttccaacaagagaagaggggagttttccagcagttacataatatgtaatggcatcatgtctctgatggctaagaaaatgggcaattgttgactttgtgtgttaaaaaaattctcagtgttggtttcttatactataaatattcatcttgtgttttgaaaaagaaaagctctttggaatcccctatgaacaaagactttgacagttgttgatctaagaccacagcttaartatctacacaagaaaaaaaaaaaaagcaaataagagccaaggaaagcagatggaaggaagtagtccaaaccagtgacattcagtgaacaagaaaagagaccaacaagggagtaaactcttgaaacagaaagttgattctttgaaaagatccatatgattgaacacagtctggctaaacaaatgacagaccaatgagggtgcacaaccatcaccatctggagtaacagaggagaggtgccattactatagcatcttccagttctgaaagctgaaaagaagattttgagaacaattgtatgtgaataaattcaggaatgttaatcatgtgggmcaattcctgaggaagacaacaaatcagcaaaccagatgctgaatagttagtgtagtcctgtagagagacatacagagaggctgacagagaaatatttgtatgtgcataaaacaatctacaagacacacttcaaaatcaatctcagttaatctggaggaacatatttcacagaaggtggaaggagggtattctgatcctcttgtacattgtacaacattgtacaatgtacagagtataattgtacaagtacaattgaagttgtacaagtacaagtgcaacttgcacaatgtacagagtaaacattgatgtttactctcaattttcttatggagcacagatgactttggatgtgttacaatatgaatgataatttgtctttgagatgttcgcagttgtttagaagttgaggaccatttgtgcatattatgggacctttagtgaaaatatttcaaagtctctttttacactttgttacagcaaaatgtagagggcgctaagtgcccttgaatcttctcccatctctggtgacctgtgttgttttgaaatttgcagtggcctgascaggaactactgcaggaatccagatgctgagattcgcccttggtgttacaccatggatcccagtgtcaggtgggagtactgcaacctgacacaatgcctggtgacagaatcaagtgtccttgcaactctcacggtggtcccagayccaagcacagaggcttcttctgaagaaggtaggaagtctrtggccagacaaccacaccctaggacgttgggatgaaaasagttgcaaaatcttagtgatatagaagccttccatgctcacacaattccaagtagaatgtggactcagggtcagccactgggaaggaacactcagcgccttctctgggagaaccagagctgtgatgtttggtaccctgtgaaagggtggtatctataggaagggtgcagaccctctagggcactggacttaccactcccctggttattcaaaggatcattttagtgtcttagccagaagaatattctaacattttgccaaatttgtgaagatttaccaagctcatgataagcctttcatggtatttcttcaagtagtcagtgttcrttgcatctttggctttgyggtttcggaggaatgcggtttttgagtctgtcatccttgagaaacctaatatgacttttcttagttccatatacttctgggtccaggtagcagtacatagccaacaaatgctccatcgttctggcctatctccatcttaagccagtcctgcacaactaggctttgatgggagggatctctcagtgttcttgcccctccttctcatggaacatatatctgtgttggtctytgagaagaagagtagtggatatctactttgttgcaatgcagaatcctgggcsaaagataccagccatccctccaagggaataaaattttggccagtagccctctctgagagacaatttgtctttgcctacgagtcctagatgcaggaccgcttcctgccccatcttcaagaagctgaaggctttggctttggaggatcagcagtctagggaaatgtgtgacggtttcatgtctgtccccactgacagtcaatcaccacctacaacctgcacagcctgatgcatagcagtctagtttcctgccttattctcaggaacacccagaagatgtctatattaaagagcatgcacatgagtrcaattttgactgataggcactctgatctttcctttggtgcctgtgttttaaaggaaatctttctaagaactcgttaaagttctagaatgctatgaatctttgggttttattattggtatgtccatctgcctgctagtacagaacagagcatggtagtctttctcagagacaatgatcctgtttcagtcacagatttcttctgatgcttctgtgttctagaaattactcagcttkatttctcctctttgaatttcagcaccaacggagcaaagccccggggtccaggattgctaccatggtgatggacagagttatcgaggctcattctctaccactgtcacaggaaggacatgtcagtcttggtyctctatgacaccacactggcatcagaggacaacagaatattatccaaatgggtacaaccttgagttttcttcaaagacagacagcagcccccttacatttctcttggaagggccatgcttccaactaacttcttatgacaaatttatctcagatctggaatgttgggtagaatgtctcaggcttctttcttcaggcacagtgtctgaaaggagagaaatgtcaggccagctctcttttctcatagttgacagaagcaggaggatatttgaaggtggtgagttctcatgaatagaaagctcaggacacatggccacgtgcttagaaatagcaccattccacaatgcccactaaagaccaatgcaatagttcaaccagggatttctgtcattctaatctccaagtcctgaagtgaaggttgtattagccatgttcatcttgggcaacaaataaaggatatctatgttgacatccagatcttccaatcactttctcctctaacctgtacctgggttctgagaacaaggtatctgaagagctatgtgttgccagcacatgaggggcaaaagtaggaaggcagctgagagtcaggaagtataaagattctgaagagttacacatgcaggaagatggacagaaacccagttcagaccacgtcagcgtttctgccatgaaggactatcaaatacataggaaaagtgttttcataggttggacaacagacatgacaggcctgagaaaattcagaaagggaatcaaaggagatcaaccttatcatgtccctggcatccttccttgagacccttgaagggcaagcagatggagcccagctgaccacagcagtcttgcttaactgaggagagagactggagtttgtgatgcctcaggcatctgacgtattctaggctggctaagaatgagaggggatttgtggargaaaggagctccaagaatacacaccgaagtcttctcaaggctttggctaaatacaaagctgcgtatgcacaaggagagttttcacaaagaaagaacaataaagaaaagctactggggaaagaacaactgcaagggaacagtgagctcaatggagatgctagagctcacatagcactgggggatatttgagttctgaccactcagaggagagacacctcactgaacatcttgggcattcagtagaggtcaaagaaagccataatttgggagtaggatcttcggattcctagaaataaggtgactccagaaacactccagcaacccttcttccaagccagtctaaaaggatccaaatgatttccaagtaaattaactgccttccagaaaaaagtaaactcaaccctccttagaggtaaggaacgaatacaagtttctcagttatatgacatccccagagtgcaacttgcatttaaaaatttactagacacaaaagaagttttcactgtgatccataactgggagaaaaatcactcaacacaaataggcccagaaataatagaaattatggcattggcaagaacatttaaaatgcacctctgagaactgtgtttcaggaaaatgtcagcaaaagctgaccatgagagaaatgaatgcataatatcagaaaagaaaagaattgaagagccaaatggaaatttaaaaactgagaaaagttatatctgtaatgaggaattcactggatggccttataaccagtttagatattatggtaggaaaaggtgaaygagaaaatgattcaattaaagctagacaaaccacaagacagacagacagacacaaatacacatacacacaatgactgaaccaattaatcaacagagcctcaaggacatctaggaaaacatccacacatttaatatatgtgttaggcaagtcacagaaagagaggaaaaagataatgtgacagaagttatacttgaagccatgacggctgacaaatttccaaacatacagaaaatgagaaattcatagtcatgaagctcaatgactcaggtatagatttttaaagagcaaaactctgatttacyggggtacatcatagttaaattgtctgatttcaaagctaagaagaaaaaaagggggttcctatgaacaaacattttgacagttgatctaagaccacagcttaaatatctaggcaaggaaaagcaaataagacacaaggaaaggggatggatggaaatagtccaaaccaatgacattcagtgaacaagaaaatagaccaacaaaggagtaaatccrtgaaacagaaagttggttctttgaaaagattcatgtgattgaccacagtctggctraacagatgacagaccaaggagggagtacaaccatcaccatttgaagtaacaggggagaggagccattgctataccatactccaggtctgaaagctgacaagaagatatcaagaaaaactgtatgtgaataaattcatgaatgtagatcatgtggatcaattccttaggtaaacaacaaatcagcaaaccagatactgaatagattgggtactcctatagaaagacatacagatagccagacagagaaacatttgtacgtgcataaaacaatctacaagactcacttcaaaatctctcagttaatccaaagtaacatatttggcagaaggtggaaggagrgtattctgatcctttcttgtacacattgatgttttctctcggttttcttatggagtatagacgagtttggatgtgttacaataagaatgataatctgtctttgaaatgttcacagttgtttagaagttgaggacgatttrtgattgttacaggacctttagtgagaatatttcaaagtcactttttaccactttgttacaacaaaatgtagrggatgtctggtgcccttgtatcttctcccatctctggtgaactgtattgttttgtaatttgcagtggcctgaccaggaactactgcaggaatccagatgctgagattagtccttggtgttataccatggatcccaatgtcagatgggagtactgcaacctgacacaatgtccagtgacagaatcaagtgtccttgcgacgtccacggctgtttctgaacaaggtaagaagtctctggccagacaaccacacccttggacgttgggataaaaagagttgcaaaatcttagtgatacagaagccttccatgctgcacgggaatctgaatgtggactcagggtcagccaatgggaaggaagcctcagcgccttctctgggggaaccagggctgagatttttggcaccccgtgacagggtggtgtctttaggaagcgtgcagaccttctagggcactggatttaccactcccctggttattcaatagattatttcagtgtcctagtgaaaatggatattctaacatcctgccaaatttgtgatgatttaccaagctcatcatgagcctttcctggtatttcttcaagtagacagtactcattgcaaacttcagctttacagtttcagaggaatgtggtttttgagtctgtcatccttgagaaacctgatatgactttacttagttccatatcctcctgggtctaggtaacagtacatagccagcaaatgctctatctccctgtctaccttaatcttaggcaggtgctgcacacctaggctttgatggaagggatttcttagtgttcttgcccctccttctcatggaacacgtatctgtgttgctgtttgtgaagaagagtagtggatgtctactttgttgcaatgcaggatcctgggcccaagatttcccgccgtccctccaagggaataaaattttggccagtacccctctctgagagacaatgtgtctttgcctggaagtcctagatggaggaccacttcctgccccatcttccagaaacttaaggctttggctttggaggatcagtgctctggagaaatgtgtgacggtttcatgtctgcccccactgacaaccaccacctacagcctgcaccgcctgatgcatggcactctggtctcctgccttgttctcaggaacacccaaaagagatctttgccaaagaacaggcacatgagtgcaattttgactgataggcactctgatctgtcctttggtgcccaggttttaaagaaaatctttctaaaaactcattgaagttccagaatgctatgaatctttgagctttgttattggcatgtccatctgcctactaatgtagaacagagcatggtcgtcattttcagagatgatgtcctgtttctatcatggattttttttctcatgcttctgtgttctggaaattactcagtttgwtttctcctctttgaatttcagcaccaacggagcaaagccccacagtccaggactgctaccatggtgatggacagagttatcgaggctcattctccaccactgttacaggaaggacatgtcagtcttggtcctctatgacmccacactggcatcagagaaccacagaatactacccaaatgggtatgtctttgagttttctcccaagagaaasagccacccacttaaatttctcctggaagagccatgcttccagctaacttcttatgacccaatttctctcagacccagaatgttggacagaatgtctcaggcttcttgctttgggcacagggtctgagaggagagaaatgtcaggccagctctcttttctcatagttgatagaagtaggaggatacttggaggtggtgagktctcatgaatagaaagctcagaagaacatatgaccatgtgcttagaaatagcaccattccacaatgcccactaaagaccagtgaaatagttcaaccagggaattctgtcattctaatctccaagccctggagtgaaggttgtgtttgccatgtttgtcttgggtaacaagtgaaggatatctatattgacttcgagatcttccgatcactttctcctctaacctgtataaacacaytgggttctgagaacaaggtgtctgaaaagctatgtgttgccagcccatgaggggcaaaaggaggaaggcagctgagagtcaggaagtatagagatgctgaagagttacacattcaggaagatggacagaaacccatgtctggctatgccagcctttctgccatgaaggactatcaaatacatgagaaaacagttttcacaggttggacaacagatatggtaggcttgagagaactgagaaagggaatcaaaggagatcaacttcatcattaacctgtcttccttcctggacacagtgttggattgaaggacaagcagatggagcccagctgaccacagcagtcttgcttaactgaggagagagactggagtctgcgatgcctcaggcagctgatgtgttctaggctggctaagaatgagaakggatttgtggargaaaggagctccaggaatacacacagaagtctcctcaaggctttggctaaatacaaagctgcgtatgcacagggagagttttcataaagaaagaacaacaaagaaaagctacttgggaaagaacaactgcaggggaacagtaagctcaatggagatgccagagctcacatagcactgggggatatttgaattctgaccactcagaggagaaacacctcactacattttgggcattcagtagagaccaaagaaagctgtattttgggattgggatcatcttattcctagaatcaaggtgactccagaaaaactccaacaacccttcttccaagccagtctaaaaggatccaaatgatctccaagtaaattaactgcattccacaagaaaaaaaaaactcaaccccccttagaggcaagggacaaatacaagttgctcagttatatggcattcctattgcgttacttctatttaaaaatttaatagagacacaagaagctttcactgtgatacataactgggagaaaaaatcactcaacacaaacaggcccagaaattatagaaytgatgacattggtgagaacatttaaaatgcacctctgagaactgtgtttcaggaaaatgtcagcaaaagctgaccatgagagaaacaaaagcagaatagcaagagaaaagaaaagaaccggagagccaaatgaaaattaaagaactgagaaaaggtacatctctaatgaagaactcactggatggccttatcatcactttagacattacggtaggaaaggtgacctagaaaataattcaataggagctacacaaatcacaggacagacagacagaccaacagacagaaacacacacacacacacacacacacacacacacacacacacacacacacaaagactgaacctattaatcaacagagcctcaagggcatctaggaaaaatccacacatttaatatatgtgttaggcaagtcacagaaggagaagaaaaagatatcatgacagacattatacttgaagcgatgatggctcrcaacacgccaaayatacagaaaacaagaaactcatagtcaagaagctaaatgactcaggtatagaattttaaagagcaaaactctatgatttactgggatatatcatagttaagttgcctcaattcaaagctaaaaagaaaaaaagggggttcctatgaacaacagctttgacagctgttgatctaagaccacagcttaaatatctaggcaaggaaaagcaaataaggcacaaggaaagaggatggaaggaaatagtccaaaccaatgacattcagtggaaaagaaaatagaccaacaaaggagtaaatccatgaaacagaaagttaggttctttgaaaagtctatatgattggccaaagtctggctaaacagatgacagaccaaggagggagcatatccatcaccatcatgagtaacaggagagagatgccattgctatagcatcctccaggtgtgaaagctgagaagtagatattgagatcaactgtatgtaaataaattcatgaatgtagatcatgtggatggattscttaggtaaataacaaatcagcaaatcaaacactgaatagatcatgcagttttatagagacttacagacagcctgacagataaacatttgtatgtacgtgaaacaatctccaagacacacttcaaaatccctctcggttaatccaaaggaatgtatttggcagaaggtagaaggagggtattctgatcctttctggtacacattgatgttttctctcagttttcttataaagcatagattactttgaatgtgttacaataagaatcataagctgtctttgaaatgttgacagttgtttagaagttgaggaccatttgygagygttatgggactttagtgagaatatttcaaatttgcttgtttacactttgttacaagaaaacatagagggtgccaggtggtgctgtatcttctccaatctctggtgacctgtattgttttggaatttgcagtggcctgaccaggaactactgcaggaatccagatgctgagattcgcccttggtgttataccatggatcccagtgtcagatgggagtactgcaacctgacrcaatgtccagtgatggaatcaactstcctcacaactcccacggtggtcccagttccaagcacagagsttccttctgaagaaggtaagaagcctgcagtcagacaaccataccctcggacattgggataaaaagatttgcaaaatctttgtgatgcrgaaaacttccatgctgcacaggaagtcgaaggtgaagtcatggacarccaatgggaaggaagcttcagtgccttctctggggggaccagagctgggatgttgagtgccttgtgagggatggtgtctttaaaaggggcacagaccctctaggacactggatttatcacttccctgttatcaaacgaatcatattagtgtcctagccaagatggatattctaacatcctgccaaacttgtgaagatataccaagctcctaagcctgtccagccctttcttcaagtaggcagtgtttattgcagtcttcagctttaccattttgaaggaatgccatttttgaggctgttgttcttgagaaacctaacatgtcttcattagatccgtattgtcctgagactttgaagcagtacatagccaccraattgtttatctccccagcctaccttcatcttgggcatgccttccacacctaggatttgagggaagggatttctcagtgttctcatccctgcttctcatggaacatttatctccgttgttttttgagaagaagagtagtggatgtcagctttcttgtaatgakggatcctgggcccaagattccctgtctcccctcctaggctataaaattttggcctgtactccttctccctgagaggcaatgtgtctttacctacaagtcctagatgcaagatccttttctgccccacaccccagaatctgaaggcttttgctttggaggagcagtggtctagtgtgcaagggtttcatgtataccccccactaacagccaatcaccacctatagcctgaacagcttgatgcatggcaccctggtctcctgccttgttctcatgaacacccagaagaggtgtaagcaaaagaccattcacatgagtgtaattttgaagtataggcactctgatctgttttttgtttgtttctttgtttgtytgttttccagggttgaattaaaatatttatgactacttattaaatttctagaatcctataagtctatttgtatttttattctacatttcaatttgcatgctaatatagaagagtgtaaattgttaatcctcagattattccactttgtgtgtcataatttttttcacatttcccttttctaggcaatactgagcttgattttctcttttaatttcagcaccaactgaaaacagcactggggtccaggactgctaccgaggtgatrgacagagttatcgaggcmcactctccaccactatcacaggaagaacatgtcagtcttggtcgtctatgacaccacattggcatcggaggatcccattatactatccaaatgcrtatgtctatcatgttagccataaaaggaacaatagtcaactaaaatttctcttagctggcccatgctacaagctcacttcctaggtccaaatttctcatagactcagagtttgtagcaaaatgtctcaggaaacttacttttgagcaaaaggtctgaatgaagagaagttttaggattgctatctttcataacaatttgatggaagcagcaggatatatggaggtggtgaagtctcattaatgtaaagctaaggagatcaaatgaccaaatgctgagacaaagtatcattccacaatgcccactaaaggtccatgcagtctttcaaccatgcaattctatcattctatcctccattccctgaagtgaaatttgtgtttgccatttttgacacgaatcagaagtaacaaattcaggctgggtgcagtggctcaggcctgtgatcccaacactttgggaggacaagacgggcagatcaccagaggtcaggagttcaagaccagcctggctaacatggcaaaaccccatctctacgaaaaattaaaaaattagccggtcatggtggtgggtacctgtaattccaactacttgggaggctgaggcaggagaarcacttgagcctgggattcagagtttgctgtgagccgagaacatgccactgcactccagcctgggtgacagagcaagactcaatctcaaaaaaaaaaaaaaagaagaagaagaagaaaagaagaagaggaagaagaagaagaggaagaagaagaagaagaagaagagtaagagaaattttttggagccgcaggaggagccagaagaagaagaagaagaagaagaagaagaagaagaagaagaaggargaagaagaagaagaagaagaagaagaagaagaagaagaagaagaagaagaagaagaagaagaagaagaaaatagaaatgagtgcatatatttatatatgagtactagcctgtatgaacacactgggttctaagcaccagttttctgaagggatatgggttgtcaggcagagtaaaagcaggaatgcagatgagagtcaggaagtaaacagatgtggtgattaaaatgggcaggtacatggacaaaaaaatgcatgtctgacaaaaactggcctcttgccataagtgagtatgaataatatggaaaaactgtttgcacatgttgaacagcagacagtacaacctgagatagtttagaaagggaaacaaataagatcaaccccataattacccttcctagacttaagggcaaagagttttaaccaaagcattccacagcagtcttgctaaactggggagagagactggagttttgtttactaataaaaccgagattttctaggttaggtaataatgagaaagtatttgtggagaaaaggagctccaggaatacacacagaagtctcttcaagtctctggctgaacagaaagctgtgtatgcacagaaagagtttccagagagaaaggagaacaaagaacagctactggggaaagaacaactgctggggaacagtgagctcaatgaagatgccagagctcacatagcactgggaggtatttgagctctgaccagcctgaggagagacacttcattgaacatcttgggcattcagcaaagaccccaaaaaaccatacttcaggagtagaattaatgcattcctagaataaagtctactccagaaacaccctagaaaagcttagaaaccaagtctaaaaagatccaaatgatctccaagtaaattaattgcctgtcagaagaaaacaacctcttcagaggtaaacaacaaaattaaattgctcaattatatagtatgcacaatgtgtggcatacatttaaaaatttgctaaacatacaaaaagcatttagtgtgacccataaccaggagaaaaatcagtcaatacaaatagacccaaaaatgataaaaataacagaattggcaaggagatttaaaatgtatgtatcataattgtgttcaaggatttaaagaaagcgtggacaagaaataaataaatggataatatcaacagaaagaaaaattgtaaaaggaccaaatggagagtcaagaactgaaaaaaaagacatctctttaatgagaaaatcactacatggccttataatcatattagatagtacagatgataaagctaactagaaaatattagggtggtgcaaaccatagcacgcttatacaaagcctgagaagataaacagagcctcaaggacatctatgaaaatatcaaaatatttaatatttgtttaaagcaagtcacagaggargggaaagagatattggaacagaaaaaatacttgaagcagtgatggctgatgactttctaaatatggaaaaaatgataaactcacatagtcaagaagctcaatggatcagatataggattttaaaaagtaaagctgtatgatttatttggacacatcataattaaattgtccataatcaaagatagaaagtaaaatcttatttgaagcccaagggaaaaaacatacctttacatagagtaacagtgacacaaatgactgatgccttctcatcagaaacaacacaaatcagaaacaatagaataacacctttagagtggtaagaagaaaaaaagatcaaatcagaaacaacaaaataacacgtttagagtggtaaggaggaaaacaagatcaaatcagaaacaatggaataacacctttagagtgtaagaaagaaaaaaagatcaaatcaggaacaacagaataacgccttcagagtggtaagaaggaaaacaagataaaatcagaaacaatgaaataacacctttagagtagtaagaagaagaaaagatcaggtcagaaaaaatggaataayatgctaagaagaaaaaaaaagatcaagtcagaaacaatggaataacacctttagagtgaaaagaaggaaaaaaacccagcaagcttaaacgctatgcacagcaaacaattccactgaaaatgaatgttacgtaagtacatattctgtcctcctaaaaacaaagaacaaataaaagaatgtttcatcagcaggattatgtaataaaagatgtgaaagaatgctatgtaagtagaagaaaaataataccatatgggaattggcatcaaaaccacaaaatactatcaaaacaaaaaaactttattgataaatttaacacaatatgcaaaagaactataccatgtatactacataacattggtgagaagaaaattagaagatctaaataaagacacatcatgcttatagattaaaaaatccaatgtcacttttcacaaaactgatctttagyttcaacccacacccaagcagaattcctgcagtcttttcttgaaaacctaacagaatgtatatgctagaatcaccaagacaatctttaaaaagaataaaaaacttggaataaaatcacaagtttgtgggatagatgcatatggtaatatggaaattctcataaagacacagtaatcaagacatgtggtattggctgggacgcttggctgtaatcctaacactttgggaggccaagatgagaggattgcctgagatgaggagttgcagacaagcctgggcaacatagcaagaccctcatctctacaaatatttaaaaaaattagccaggtttggtgccatgtgcctgtagtcccagctattcaggaagctgaggtgggaggatcactggagcccatgaggtggaggctgaaatgagccatgattgtgctactgaactttagcctgggagacagattaaaaccttccctctctctctcaaacaaacaaacaaaaaatacatagtattgggcaaaacatatgcaaacaaaaacagaaaagggtcagcataaatttacatatatggtcaatttattttcaatacaggtagcaaagcaatttaatgaggaaatttttttccaaaattggtctgaaacaactggatagccatagaaaaaaactataacaaatgtgacgcttgaatcctactgtatgactcaaattaaattaatttgagatagctcttagacctcaatgtaacagctaattctgaggctgaaatataagactgctatgaaaaagtatagtatcttataaccttggagaaggaaaaattttttgagggaagaaccagaaaacactaactgtaaaagaaaacaaatgataatgtggacattcattgaataaaaacttatgctcaccaaatatgactgttaagaaaataaataagtaagtaacacactggaagaaaaacactctcatccatatatctgacaaatggcctgtatccagagtatagaaacatttctcccactcactaatcagaggacaaacaacctaatcaaaatgggcaacaggcttgaayagtcatttcttaggagaagatgcacacagagccaacaatcacctgaaaaagtgcacaacatcttagccatcaaaaatcaagagttataaccctcataagatgacactgaacatccagtgtacatggatatcattaagaagacacaataataagtggtgtcaccgatttggagctagaatgtgycactctctcatatgctggtggaagttcaaaatcatacaacaaattaaaaaatcagtctgatgctttcttataaagttcgataaatatgcatctatcctacaaacctgtaattctattcttgaatatttaccccccaaaatgaaaacataagtccacaaaaatctatataaatattcatagcagctttatgttttataaactcaaaataaaaactatttcaatgttttcatcaaaagaaaatgaaaactatttaaatggtttcatcaaaagaaaatgaaaaaagaatttccagtatatttatacaaaggaatactattcatcaacaaggaacaagttactgatagtctcagaagcatgaacaaacctcraaaatatattaaggaaagaagccagacgtcaaagtgtatagtctgtatgagtccattcatgtgagtttatagaaaacacaatttatggtgaaagaaaccaatagcatttgacactggccgtgggaagagggtagcagagattgattgagcagccacacaagggagtttctggggtggtgaaaatgttctgcattgtgagggcagtgtgggctacacaagtatatgtatttatcaaatctcatccagctacatttaagatctgtgcatctcactctatgtgaaaatatactcaactgaaaaacagagcaggtatctgtttcaggtgctacatcacttgatacgtccagttgtgttaaaaaccactgcctaacatcctcaaatgggggatctgggcttgagactaggtcacatgtgtagagtctctacagagaccgtgttggattcccatgctccataatacgttccaagttttctcagacagccacaggtcatgaatgtgaggattctgagaggttggagcaacgttcttgggaggcataatggggaaggcattctccaagattcctccagcctggggtcttcacctgctgtgcctcttactgcattgttttctgactcatccatagccacttgaccccttcagatcccatagtctacctagccgtctccctttatgccttgggtcccgctgttctttcaactcatcacccattccttcagtcccagagtggctgcagccagcagaggatggactgagagcaggagaggaggtcgtgcccatgaacccatcctagagaagcagcatcctgcctgggagctagttttccagggaagcttttataagtcctgtagacccaaacccacttgctctaccagatacagtatttatagtaatactattttcatgattattttatattgcaaatgtagagcatttatgctacactatgagtaaatagagtaagggggctggcatgggaattatataatcttggatgccacttcttccttggggaaatgtatttgagttccaacttacatattactatatagtcttatagagagagagacaaagagctagacagacagagatatctttgtatgtgcattaaaaaatctaagatacatatttcaaaatctgtgtcatttattctggaggaaagtatttggcagaaggtgaaaggaagatattctgatcctttcttgtacagacatgtattatctcagttttcatagagagcatatactacttttgatgttttaaaacaaaaattataatctgtgatgtgtccacagttgtttaaaagttgaagctgaagaccatttgtgcttgtggcaatattattgtggtataatgggaatatttcaaaggcacttgttaacactttgttacagcaaaatgtagagggcgctaagtgcccttgaatattctcccatctctggtgacctgtgttgttttgaaatttgcagtggcctgaccaggaactactgcaggaatccagatgctgagattcgcccttggtgttacaccatggatcccagtgtcaggtgggagtactgcaacctgacacgatgtccagtgacagaatcgagtgtcctcacaactcccacagtggccccggttccaagcacagaggctccttctgaacaaggtaagaaatttgtggttagacatctatatactgggatgaaaaaccatggaaaatcttactgatgcagaagccttcagtggtacactggagggttggttgagggtctgcaatgtggaggaaagcctcagcgccctctctgggggatccagaactgtgatttttggcacgctgtgaggaggcagtgtctttaggaagggcacggtgtctttaggaagggcacagacccgccagggcactggacttaccactcccctggttattaaatgggtcatttcagtgtcctagccaaaatggatattctaacagcctgccaaatatgtgaagatttccaagccaataagcctttccagtgatttaaagtagrcttttttcattgcaatctacagtttgcagtttcttaagaacatggcctttgagtatgatatcctagagaaacctaaggagactgcattatttttctattgtcctggggctgcatagcaggaggtaaccaacgaatgctgtctctccctggyctatctcagtctttcacaggctctgttcacctcagctttgaagttagaaatttctaggtgttcttgcctcttcttctcatgaaacctgcattggcagtgagtctacagaagaagaggaagagaattctgctttgttacaattcaggactctgggcactagaagattccctatctctcctccaagggaataagttgtttgtctctaaccctccttgagaaacaatgagtctttgcctgcactcctaaatgtaggatgatttcctgcccaaattttcaaaagattaagccttttgccttggtatgagcaatggtctagggaaatgcgcaagggtcttgtgtcggcccctgactgaccaccagtcacctcctacagcctgcaccaaggaatgcattgcattctggtcttctgccctgtggttctcatgaaaaccagcagagattcatatgatggagctgcacatgaatgtaatttccaatgtccagcattctcctctgttctttatctttagatttaaaaataatgtttctatgaacttattaaaattctagaatactatgaatctactgggtcttttcacatccttttgctactagtagaaaaaagaatagtaataattttcagaggctactgtccagtatgtgacataaattgtctcccatgtttctctgctcatgcaattactgagtatgatttattttattttaatttcagcaccacctgagaaaagccctgtggtccaggattgctaccatggtgatggayggagttatcgaggcatatcctccaccactgtcacaggaaggacctgtcaatcttggtcatctatgataccacactggyatcagaggaccccagaaaactacccaaatgcgtatgtatttgattaaaacmataagaggagcaacagccaactcaaatattggttagaagacccatgctttaagctcacttcctagggacaaatttctcttagactcacattttggcaaaatgtctcaggacctttgcttttgagcaaagagtctaagagaagagaaattttaggcctgctatttttcctaatagttttatggaaggagtagaatatacggaagtggcgaagtcatattaatgtaaagctcagaagataaatgaccaaagcttaaacacagcaccattccacaatgcccactaaaaatcaatgtcatctttcactcgtgcaattctgtcattctaaatttcaattcccgaaggtttgtttgccatttttgtcatgggtaataagtaaaaaaaaaaaaattaagatgtgtatatatatatrtatrtatatatatayayacacacacacacacacacaaacatctgaatatttatatatatgtctgaatatwtatatacttgtgtataaaacttatatttaaatttttgcataaatttatatatttttaatatttcaytaaaaattatattgtttcactatgtatgtctgagtatttttatatattttaatataacattttaaatattyatatataaatattcaggtatgtaactgaatattcatttacacacacaaatatatgtgtgcatgtgtgtatatatatatatacmcatatatatatatatatatacayatatatatrtatatatatatagtatatatatatatatatatatatacacayatatatatayatatatrtgtatatatatatrtatatatatayacacacacacacacacacacatacatacaggtataaacacactgggcctgaagcaccagtggtctgaaaggacatgtgttgccaggacttgaagagcaaaagcaggaaggcggatgagagtcaggaggtacacaaacgctgaaaagtaaaatggacaagtacatggacaaaaagcaggtataagcataacagccttttggaagtaaatgactataaaatatatgaaaatactgttttcacaagttgcacaacagatagtagtgtattgagataatttagaacagaaaacaaatgtgatcaaccccataagtgtgctgtatttcatcatggattgaaggaaaaagagatggagcccaagaagaccacagcagtcttgatgaactgagagacaccagagtttgggattacaaaggcagctgggattttctacacttggtaataatgagaaagaatttgtggagataaagagctacagtcatgtacctagaagtcacctcagtgtaatataaatctgcatatgcacagggagtgattccacaatgaaagtaggacaaagaacagctactggggaaagaayaactacaagggaacaatgagttcaatggagatggcagagctcacaaagcactgggggatatttgagttcttaccagctagaaaagagacctcattgcaaatcttgggcattcagtagagaccccagaaaagccactctttggaaacagagttgatgtattttaagagcaaaatctactccacaaaaatcctagcaaaattgaaaagcaagtcagaaagaccaaaatcctctcaacataaattagttgcccatcagaagaaagcttaacctcttcataggtaaacaataaaatcaaattgctcagttatctggcatccacaatatgtgacataaatttaaaaatttactagacatacaagaagcatttagtgtgatccataaccaggagaaaaatcattcaatacaaatagacccagaaatgacagaaatgatagaattagcaaaaacatttaaaatatacatatgatcayttgatcttgtgatcagatatcacaagagaagaaagagatacttgaacagaaaaaatgcctgaagcaatgatggctgaaaactttccaaatatgaagaaaaaaaarctcacagattcaagaaaactaatcaatcagaaatatgattttgaaaagtaaaaatgtatgatttactttggcaaatcttcttggttaaattgtctaaaatcaaagaaagctaggaaaattttataagccagaggaaaaaagattgtttatataaaggaacagttacacaaatgactgatgccttctcatcagaaacaatgaaagtcagaaacaataaagtaacatctttaaagtaatagaagaaaaacccaagaggtragggatcrtggcagacaggaggcaggactagattgcagctctggacagagcagcatgcagaggctcatattgtgaattttagccccatattgactgcaagaacagaccagcaatcctgagaggacccacagaccgtgtgaaggaagcagactgctcctgcaggataagggagacaccccaaatactgtgagttccccaactgcagaagtggaaaagggaggccttactccctcaaacacaccccacaactggagaagctgaaagtctgtttgcaggagaagttcccaactttacctgggcctcagtaaatttagagagctgagccaagcaaaatataggggtagaggaagcagcagagaagacctcagagcttgctggatccccaagcagctcattcctgcctggcaccacagagatccatcagaagtgtggccaaaggaacagagggtaaaactccacatggaggactgctctacctgaactttctaacaatttgaacagggggagaagcctcctggccagaacttgggggagggcatgaatctggtttgcagacttcacaggtgggggaaggactaaagcccttttctttcacagctgggaggtggaaagcctcaggcaagttttcaagcctgactttccccccacctggaaacagacttggagctgttgcggggttgggggcatggtgggagtaagaccagcccttcagtttgcatgggtgctgggtgaggcctgtgactgacagcttccctccacttcccygacaactcagatgactcagcagaggcagccataatcctcctaggtacacaactccagtgacctgggaacttcacccccacaccatacagaagcttcagtaagacgtgcccaaggaaagtctgagctcagacacgcctagtcccacccccaactgatggtccttccctacccaccctggtagcagaagacaaagagcatataatctttggagttctagggcccacccacctctagtccctctccacactagtatagctgatgcaggaggccaaccagcacaaaaatagagcattaaaccaccaaagctaggaacccctatggagtccattgcaccctcctccacctccaccagaacaggcactggtatccacagctgagagacccatagatggttcacatcacaggactctgtacagacagtccccagtaccagcccagagctgggtagacttgctaggtggcaagacccagaagacaggcaataatcactgcagttcagctcacaggaagccacatccataggaaaagagggagagtactacatcaagggaacaccccatgggataaaaacatctgaacaacagccttcagccctaccttccctctgacacagtctacccaaatgagaaggaaccagaaaaccaaccctggtaatatgacaaaacaaggctcatcacactcccagttcaccagcaatggatccaaaccaagaagaaatccctgatttacctgaaagagaattcaggaggttagttattaagctaatcagggagggaccagagaaaggcaaagcccaatgcaaggaaatccaaaaaaaaaaaggtataagaagtaaaaggtgaaatattcaacaaaatagatagcttaataaaaaaacaataaaaaattcagtagactttggacacacctttggaaatgtgacatgctctggaaagtctcagcaatagaactgaacaagtagaaaaaataaattcagagctcaaagacaaggacttcaaattaacccaatccaacaaagacaaagaataaaggataagaaaatatgaacaaagcctycaagatgtctgggattatgttaaatgaccaaatataagaataatcgtggctcctgaggaaaaagacaatactaaaagcttggaaaacatatttgggggaataactggggaaaacttacctggccttgctggacacctagacatgcaaatacaagaaacacaaagaacatgtaaatacaagcagcacaaagaacacctgggaaattcatcacaaaaagatcttagcctaggcacattctcatcaggttatgcaaagttaagacgaaggcaagaatcttaagagctgtgagacagaagcaccaggtaatgtataaaggaaaccctatcagattaacagccagtttttcagcaggaactgtacaagctataaaggattggagccctatcatagcctcytcaaacaaaacaattatcagtcaagaattttgtatccagcgaaagtaagcatcatatatgaaggaaagatacagtcgtttttggacaaacaaatgctaagagaattcaccattaccaagtcaccactagaagaactgctaaaaggagctctaaatcttgaaacaaatcctagaaacacatgaaaacagaatctctttaaagcataaatcacacaggacctataaaacaaaagtacaagttaaaaaacaaaaacaaaaaacaaaaccaaagtacggaggcaataaagaatatgatgaatgcagtggcacctcacatttcaatgctaaaattgaatctaaatggcctaaatgctccacttaaaggatacaaaaagagttggtggctggcaagatggctgaataggaacagctccagtctgccgctccccgtgagatcaacacatagggtgggtcatttctgcatttccaaccaaggtacccggctcatctcattgggactggttagacagtgggtgcagcccacagagggtgacctgaagcagggtggggtgtcacctcacctgggaagtggaaggggtcagggaactccctcccctagccaaaggaagccgtgagggactgtgccgtgaagaccagtgcattctggcacaaatactatgcttttcccacggtctttgcaacctgaagaccaggagattcccttgggtgcctacaccaccagggccctggatttcaagcccaaaactgggctggcatttgggcagacactaagctagctgcaggagttttttttcataccccagtggtccctggaatgccagcaagacagaaccattcacccccgtgaagaaagggctgaagccagggagctaagtggtctttctcagtggatcccacccccatggagcccagcaagctaagctccactggcttgaaattcttgctgccagcacagcagtctgaagttgacctgggacgctcaagcttggtgggaggaggggtatccacaaatactggggcttgagtaggaggttttcccctcacagtgtaagcaaaacygctaggaagtttgaactgggcagggtgcactgcagcttggcaaagccattgtagcaagagtgcctctctagattcctcctctctgggcagggcatctctgaaagaaaggcagcagccccagtcagaagcttatagataaaactcccatctccctgggacagagcaactggaggaaggggtggctgtgagtgcagctccagcagacttagtttcctgcctgccagctctgaaaagagcaccagatcccccaacacagcactagagctctgataagggacagactgcctcctcaagtgggtcctggtttcagaagataataagaaactcctctgagctaaaggagcatgttctaacacaatgcaaggaagctaagaaccttgaaaaaggtcagaggaattgctaactacagtaagcagtttagagaagaacataaatgaccttagggagctgaaaaacacagcacgagaacttcatgacacatacacaagtatcaatagcaaaatcgatcaagtggaagaaaggatatcagagattgaaaatcaacttaatgaagtaaagcgtgaaaacaagattaaggaataaagaatgaaaaggaatgaacaaatcctccaagtatgggactatgtgaaaagattgaacctacgtttgattggtgtacctgaaagtgatgggagaatggaaccaagttggaaaacactcttcaggatattatccaggagaacttccccaacctagcaagacaggccaacattcaaattaaggaaatacagagaataccacattcaaattcaggaaatacagagaacaccacaaagatactcctcaagaagagcaacctgaagacacataatcgtcagattcaccaaggttgaaatgaaggaaaaaaatgttragggcagccagagagaaagtttgggttacccacaaagggaaccccatcagactaacagtggatcttcctgcagaaactctacaagccagaagagagtgggaggccaatattcaacattcttttttactattattatactttaagttctagggtacatgtgcacaaggtgcaggtttgttacatatgtatacatgtgccatgttggtgtgctgcacccattaactcttcatttacattaggtatatctcctaatactatccctccccactccccccatcccatgacaggccccggtgtgtgatgttccccactctgtgtccatgtactctcattgttcaattcccacctatgagtgagaacattcggtgtttgratttctgtccttgtgatagtttgctgagaatgatggtttccagcttcatccacatccctacaaaggacatgaagtcatccttctttatggctgcatagtattccatggtgtatatgtgycacattttcttaatccagtctaccattgatggacgtttgtgttggttccaagtctttgctattgtgaatagtgccgcaataaacatatgtgtgcatgtgtctttatagcagcatgatttataatcctttagatatatatccagtaattgtatggctgtgtcaaatggtatttctagttctaaatccttgaggaatcaccgcactgtcttccacaatggttgaactagtttacagtcccaccaccagtgtaaaaatgttcctatttctccacatcctctctagcatctgttgtttcctgactttttaatgatcmccattctaactggtatgagatggtatctcattgtggttttgatttgcatttctctgatggccagtgatggtgagcactttttcatgtgtctcttgactgcataaaagttttcttttgagaattgtctgttaatatcctttgccaactttttgatggggttgtttgattttttttcttgtaaatttgtttatgttctttgtagattctggatattagccctttgtcagatgggtagattgtaaaaattttctcccattctgtagcttgcctgttcattctgagggtagtttcttttgctgtgcagaagctctttagtttaattagatcccattggtcaattttggcttttgttgctattgcttttggtgatttagtcatgaagtccttgcccatgcctatgtcctgaatggtattgcttaggttttcttctagggtttatatggttttaggtctaacatttaagtctttaatccatcttgaattaatttttatataaggtgtaaggaagggatccagtttcagctttctacatatgkctaggcagttttcccagcaccatgtattaaatagggaaacctttccctatttcttgtttttgtcaggtttgtcatagatcagatggttgtagatgtgtggtattatttctgagggctctgttctgttccattggtctatatctctgttttggtaccagtaccatgctgttttggttactgtagccttgtaatgtagtttgaagtcaggcagagtgatgcctccagctttgcttttttggcttaggattgtcttggcaatgcatgctcttttttgttccatatgaactttaaagtagttttttccaattctgtgaagaaagtcattggtagcttgatggggatggcattgaatctataaattaccttaggcagtatggccattttcacaatattgattcttcctatccatgagcatggaatgttcttccatttgtttgtgtcctcttttatttcattaagcagtggtttgtagttctccttgaagaggtccttcccatcccttgtaagttggattcctaggtattttattctctttgaagcaattgtgaatgggagttcatccatgtccctacaaaggacatgaagtcatgtatgggaatgcttgtgatttttgcacattgattttgtatcttgagactttgctgaagttgcttatcagcttaaggagattttggtctgagaagatggggttttctaaatatacaatcatgtcatctgcaaacagggacaatttaacttcctcttttcctaactgaataccctttatttccttctcctgcctaattgccctggccagaacttccaacactatgttgaataggagtggtgagagagggcatccctgtcttgtgccagttttcaaagggaatgcttccagtttttgcccattcagtatgatattggctatgggtttgtcataaatagctcttattattttgagatatgtcccatcaatacatagtttattgagagttcagcatggagagctgttgaattttgtcaaaggccttttctgcatctrttgagataatcatgtggtttttgtctttggttctgtttatatgatggattacatttattgatttgcatatgttgaaccagccttgcatcccagggataaagccaacttgatcatggtggataagctttttgatgtgctgctggattcrgtttgccagtattttattgaggatttttgcatcaatgttcatcatggatgttggtctaaaattctcatttttgttgtgtctctgccaggmtttggtatcaggatgatgctggcctcataaaatgagttagggaggattccctctttttctmtgattggaatagtttcagaagaattggtaccagctcctctttgtatctgtggtagaattcggctatgaatctctcctggactttttttggttggtaggctcttaattattgcctcaatttcagagcctgttattggtctattcaaggattcaatttctttctggtttagtcttggtaggktgtatgtgtccaggaatttttccatttcttctagattttctagtttatttgcacagaggtgtttataatattctctgatggtagtttgtatttctgtgggattggtagtgatatcccctttatcattttttattgcatctatttgattcttctctcttttcttctttattagtcttgctagtggtctatcaattttgttgatcttttcaaaaaaccagctcctggattcattgatgttttgaaggtttttttgtgtctctatctccttcagttctgctctgrtcttagttatttcttgccttctgctagctttttaatgtgtttgctcttgcttctctagttcttttaatggtgatgttagggtgtcaattttagatctttcctgctttctcttgtgggcatttagtgctgtaaatctccccctacacactgctttaaatgtgtcccagagattctggtatgttgtgtctttgttgtcattggtttcaaagaatatctttatttctgccttcatttcgttacatacccagtagtcactcaggtgcaggttgttcagtttccatatagttgagcagtttttaatgagtttcttaatcctgagtcctagtttgattgcactgtggtctgagagacagtttgttataatttctgttcttttacatttgctgaggaatgcctcacttccaactatctggtcaatttcagaataagtgygatgtggtgctgagaagaatgtatattctgttgatttggggtggagagttctgtagatgtctattaggtctgcttggtgcagagctgagttcaattcctggatatccatgttaactttctgtctcattgatctgtctaatgttgacagtggggtgttaaagtctcccattattattgtgtgggagtctaagtctctttgtaggtctctaaggacttgctttatgaatctaggtgctcctgtattgggtgcatatatatttaggatagttagctcttcttgttaaattggtccctttaccattatgtaatggccttctttgtctcttttgatctttgttagtttaaagtctgttttatcagagactaggattgcaacccctgctttttttgttgttttccatttgcttggtagatcttcctccatccctttattttgagcctatgtgtgtctctgcacgtgagatgtgtcttcagaatacagcacactgatggatcttgactctttatccaatttkccagtctgtgtcttttaattggagcatttagcccatttacatttaaggttaatatttttatgtgtgaatttgatcctgtcatcatgatgttcgctggttattttgctcattagttgatgcagtttcttcctagcatcgatggtttttacaatttggcatgtttgtgcagtggctgataccgattgtttctttccatgtttagtgcttccttcaggagctcttgtaaggcaggcctggtggtgacaaaatctctcagcatttgcttgtctgtaaaggattttatttctccttcacttatgaagcttagtttggctggatatgatattctcagttgaaaattcttttctttaagaatgttgaatattggctgccactctcttctggcttgtagagtttctgctgagagatctgctgttagtctgatgggcttccctttgtgggtaacccgacctttctggtgaatctgacaattatgtgtcttggagttactcttctcgaggagtatttttgtggcattctctgtatttcctgaatttgaatgttggcctgcctttgtaggttggggaagttctcctggataatatcctgaagagtgttttccaacttggttccattctcctcgtcactttcaggtacaccaagcagatgtagatttggtcttttcacatagtcccatatttattggaggctttgttcatttctttttactcctttttttctctaaacttctcttctcgcttcatttcattcatttgatctttaatcactgataccctttcttccacttgattgaatcaactactgaaacttgtkcatgtgtcacgtagttctcgtgccatggttttcagctccattagatcatttaaggtcttctctatgctgtttattttagtctgccattcatctaaactttttcaaggtttttagcttctttgcaatgrgttcgaacatccttctttagctcggagaaatttgttattacagatcgtctgaagccttcttctctcaactcatcaaagtcattctctgtccagctttgttctgttgctcgtgaggagctgcgttccttcggaggagaagaggcaccctgatttttagaattttcagctgttctgctctggtttctccccatctttgtggtttatctacctttggttcttgatgatggtgatgtacagatggggttttggtgtggatgtcttttctgtttgttagttttccttctaacagtcaggaccctcagctgcaggtctgttggagtttgctggaggtccactccagtccctgtttgcctgggtattaccagtggaggctgcagaacagcaaatattacagaacagcaaatgttgctgcctgattcttcctctggaagcttcatctcagaggggcacccagctgtatgaggtgtcagttggcccctactgggaggtgtcccccagttaggctactcgggggtcacggacccacttgaggaggcagtctgtccattctcagatctcaaactctctgctgggagaaccactactctcttcaaagctgtcagacagggatgtttaagtctgcagaagtttctgctgccttttgttcagctatgccctgcccccagaggtggagtctacagaggcaggcaggtctccttgagctgtggtgggctccacccagtttgagcttcctggtcgctttgtttacctactcaagtctcagcaatggcagacgcccctcccccagctttgctgccgccttgcagttcggtctcagactactgtgctagcagttcaatctcagactgctgtactagcagtgagcaaggctctgtgggcatgggaccctctgagccatgtgcaggatataatmtcctggtgtgccgtttgctaagaccattggaaaagtgcaatattagggtgggagtgtcccgattttccgggtacatctgtcatggcttcccttggctaggaaagggaattccctgaccccttacacttcccgggtgaggcaatatcccgccttgcttcggctcactctccgtgggctgcacccactgtctgacaagccccrgtgagatgaacccagtacctcagctggaaatgcagaaaccacccatcttctgctttgctcatgctgggaactgtggactggagctgttcctattcggccatcttgaaacctcccctctctcacgatcacaaggtcccacaataggccgtctgcaggctgaggagcaagaaaagccagtctgaattccaaaactgaagaaattggagtctgatgttcaagggcaggaaacatccagtgccaaagaaagatgtagaatattcaacattcttaaagaaaataattttcaacctagaatttcatatccagccaaactaagctttataacaaaggagaagtaaaatcctttacaaacaagcaaatgctgaggaattttgtcaacaccaggcctgccttacaagaggtcctgaagaaaacmctaaatatggaaaggaaaaaccagtaacagctactgcaaaaacataccaaattgtaaacaccatcaacactataaagaaactgcatcaactaatgggcaaaatagccagctagcatcataatgacaggatcaaattcacacataacaataytaaccttaaatgtaaatgggctaaatgcccyaattaaaagacacagactgggaaattgaataaagagtcaakacccattggtttgctgtgttcagaagacccatctcagggtgaaaagacatacatgggctcaaaataaagaaatgaaggaatatttaccaagcaaatggaaagaaaaaaaaagcagcggttgcaatcttagtctttgatgaaacagactttaaaccatcaaagatcaaaagagacaaaggagggcattacctaatggtaaaagtatcaatgcaacaagargatctgactgtcctacttatatatgcacccaatacaggagcacccagattaataaagcaagttcttrgagacctacaaagagacttagacttccacacaaaaatagtgggagactttaacaccccacagccaatattagatcgacgtgacagaaaattaacaaggatattcaggacgtgaattcagctctggaccaagctgacctaatagacatctacagaactcgacaccacaaatcaacagaatatacattcttctcagcaccacattgcacttattctaaaattgaccacataattggaagtaaaacacttctcagcaaatgccgtagaatggaaatcataacaaacagtctctcagaccaaagtgcaatcaaactagaactcaggattaataaactcactcaaaaccacacaactatatggaaactgaacaacctgctcctgaattactactgggtaaataacaaaattaaggcagaagtagataagttcttagaaaccaaagagaacaaagacacaatgtgccagaatctctggtacacagctaaagccatgtttagagggaaatttatagcactaaatgcccacaggagaaagcgggaaagatctaaaatcaacaccctaacatcacaattcaaagaaccagagaagcaagagcaaacaaatacaaaagctagcagaagacaagaaataactaagatcagagcagaactgaaggggataaagacacgaaaaccctttaaaaaattaataaatccaagagctggttttttgaaaagattaacaaaatacatagaagcctagccagactaataaagaagaaaatagagaagaatcaaatagacacaataaagaataataaaggggatatcaccaatgatgccacagaaatacaaactaccatcagagaatactttaaacacctctatgcaaataaaatagaaaatctaaaagaaatggataaattcctggacacatacaccctcccaagactaaaccaggaagaagtcaaatccctgaatagaccaataacaagttctgaaatcgaggcagtaattaatagcttaccaaccaaaaaaagcccagaccagagggattaacagtcaaatcctaacagaggtacaaagaagagctagtactattccttctgaaactattccacacaatagaaaaagagggactcctgcctaactcattttatgaggccagcatcattctgataccaaaacctggcagagacacaacaagaaaagaaaatttcaggccaacatccctgatgaacatcaatgtgaaaatcctcaataaaatactggcaaactgaatccagcagcacatcaaaaagcttatccaccatgatcaagttggcttcatccctgggatgcaaggctggttcaacatattcaaatcaataaacataatccatcacataaacagaaccaatgacaaaaaccrtatgattatcgcaatagacgcagaaaaggcctttgataaaattcaatacccaatcatgctaaaaactcttaataaactaggtattgatggagcatgtctcaaaataataagagctacttatgacaaatgcatagccaatatcatactgaatgrgcagaagctggaagcattccctttgaaaaccagcacaagacaaggatgccctctctcaccactcctattcaacatagtattggaaattctgtccagggcaatcaggcaagagaaagaaataaaggtattcaagtgggaagagagggagtcaaattatttctctttgcagatgacatgattgtatatttagaaaactctatcatctcagcccaaaatctccttaagctgataagcaacttcagcaaagtctcaggatacaaaatcaatgtgcaaaaatcacaagcattcctatacaccaataagagacacagagccaaatcctgagtgaattcccattcacaattgctacaaagagaataaaatatacctaggaatccaacttacaagggatgtgaaggacctcttcaaggagaactacaaaccactgctcaaggaaataagataggacacaaacaaatggaaaaacattccatgctaatggattggaagaatcaatattgtgaaaattgccatactgcccaaagtgatttatagattcaatgttatccccatcaagctaccattgatttcttcacataattagaaaaaactactttcaatttcatatggaataraaaaagggcctgtatatccaagacaacctaagcaaaaagaacaaagctggaggcatcatgctatctgacttcaaaatatactacaaggctacagtaacaaaaacagcatggtatggtactggtaccaaaacagatatatagaccaatagaacagaacagaggcctcagaaataacaccacacatctacaactattggatctttgacaaactggacaaaaataagcaatggggaaaggattccctatttaataaatggtgttgggaaaactggctagccatatgcagaaaactgaaactggatcccytccttacaccttatacacaaattaactcaagatagattaaagaattaaatgtaagacctaaaaccataaaaaccctagaagacactttgggaggccgaggtggatggatcacgaggtcaggagatcgagaccatcttggctaacacagkgaaagcccatctctactaaaaatacaaaaaattagctgggtgtggtcgtgggcacctgtagtcccagctacttgggaggctgaggcagragaatggcatgagctgaggaggttgagcttgcagcaagccaagattgtgccactgcactccagcctgggcaacagagtgagactccatcaaaaaaacaaaaacaaaaacaaaaaatcaaaccctagaagaaaacataggcaataccattcaggacataggcatgggagaagacttcatgactaaaacagcaaaaccaatggcaacaaaagccaaaatttacaaatcagatctaattaaaataaagagcttctgcacagcaaaaaactctcatcagagtgaaaaagcaacctatggagaaaaattctgtggtctakccatctgacaaagggctaatgtttagaatgtacaagcaacttaaacaaatgtacaagaaaaaaaaaacaaccccatcaaaaagtgggcaaaggatatgaacagacacttctgacaggaagacctttatgtggctgacaaacatgaaaaaagctcatcatcactgttaattagagaaatgcaaatcgaaaccacaatgagataccatctcatgcccgttagaatggcgatcattaaaaagtcaggaaacaacagatgctgaagaggatgtgtggagaaagaggaacacatttacactgttggtgggagtgtaaattagttcaaccattgtggaagacagtgcggtgattcctcaaggatctagaaccagaagtaccatttgacccagcaatcccattactgggtatatacccaaaggattataaatcattctacaataaagacacatgcacacgtatgtttattgtagcactattcacaatagcaaagacttggaaccaactgaaatgcccatcaatgatagactggataaagaaaatgtggcacatatacactgtggaatactatgcagccataaaacaggatgagttcatgtcttttgcagggacatggatgaagctggaaaccatcattctcagcaaactaacacaagaacagaaaaccaaacaccatatgttctcactcataagtgtgagttgaacaatgagaacacatggacacaggaaggggaacatcacacacaggggcctgttggggwgttgaggctaggggagggattggattaggagaaatacctaatgtagatgatgggttgctgggtgcagcaaaccaccatgacacgtgtatacctatgtaacaaacccacacattctacacatgtatctcagaacttaaagtataataataataagatacagaactgcagaatgaataagaactcaccaaccatctgctgccttcaggagactcatttaagacataaggactcacataaacttaaagtaaatgggtggaaataataataagtggtgtcactgatgtggaggtagattataaaactcttatcatatgctggtggaagatcaaaatgataaaacgaattaaaaaatcagtcagatggtttcttaaaaagttccatcaatatgcctctatcttacaaacctgcaattctattcctgaatctttatcccaaggaaatgaaaaagtaagtccacaaagagttctatatgaatatttataggagctttatttattataattcaaactgtaaaaataatttcaatgttcatcaataacaaaatgaaaaaataatttgcaacctactggtacacttgaatactattcagcactgagtatcttaaatagcatggatggagctcaaaaatatactcaggaaagaagccatgtrtattctgtatgagttcatttacatgagatcatttacatttcctccaaaagaggaaaaactaatttctgttgaaagaaaccaatgtatttgcctctggcagtggtaagggggtagcacagattaattgggtagggactcaagagagtttctggggtcacagaaatgttccgtgtggtgatgggagtttgggctccacaggtataggtgttgatccaaaatcatcaaaaaaacaacattgcagatctgtgcatctcactctgtgggaaagtatatctcaactgtaaaaagggcagaaattgcttttaaacgctcagccttttagcacatccagttgcttggagaaccagcttactcaaatgggggtctaggctggagactaggtcacaggcatagagtctctaaactttcccatggcacataatacgtttcaggttttctcagagagctgcaggttagtaatctgaggattctgacaagttgggtcaacgttcctaggaggcatgaatgggagtgcattctctaagatccctccaccccagggtccttgctttctgtgcctcttactccattgttttctgactcctctgtagccactcgacctcttcagatcccattgtctacccagccatcgccctttatgacttgggtcccactgttctttcatctcatcctccattccctcagtttcggagtggctgccgctagcagaggatggactgagagcaggagaggtggtcctgcccaggaacccatcctagagaaatggcatcctgtctgggagctagttttttagggcaggttttataagtcttgtaaagccagacacacttgatctacctggtatgttatttacagtaatactattttcataattgcttttcactctaaaagtagagccttttagctacactgtgagtaaataaaggggctggcctgggaatggtatcatgttggatgttgtttcttccctgaagtaatatatatcagttacaatttacatgttactgcagagtcctagagagagacacagagaatgagacagataccaatacatttttatgtgcattaaaaaaatctaaggccaggcgcagtggctcacacctgtaatcccagcactttgggaggccgaggtgggtggatcacgaggtcaggagattgagaccatcctggctaacacggtgaaaccctgtctctactaaaaatacaaaaaattagccaggcgtggtggcgggcgcctgtagtcccagctactcaggagactgaggcaggagaatggcttgaacccaggaggcagaccttgcagtgagccgagattgcgccactgcactccagyctgggcgacagagcgagactccgtcacaaaaaaaaaaaaaaatctaaaatgcactcttcaaaatctatgtcatttattctggaggaatgcagttggcagaaggaggaagatattccgaatttttcttgtatacatttatgtatgatctcagtttttttatggatcatagaccaattttgatattttaaaataaaaattataatctatcttggaaatttacatggttctttagaacttgaggaccgtttttgcttttcggaatattattgtacctaaaatgggaatattacaacgtcactttttaacactttgttataacaaagtttagacagcgctgggtgcccctgaattttttcccgcctcttgtgacctgtgttgttttggaatttgcagtggcctgaccgagaactactgcaggaatccagattctgggaaacaaccctggtgttacacaaccgatccgtgtgtgaggtgggagtactgcaatctgacacaatgctcagaaacagaatcaggtgtcctagagactcccactgttgttccagttccaagcayggaggctcattctgaagcaggtaagaagtctgtggccagatatctacacatttgaacattgggatgaaaagagatrgaaaatctgactgatgcagaagccttccatgctacacagaaacttgagggtatggcaggtggaaagaagcctcagcactctctctggtggagcaatttttggcgcaacgtgcgtgggcggtgacttcaggaatggtgcaaacccacctgggcacttgacttaccactcactttgttatgaaaggggttatctcggtgttccagacaaaattccaattctaacatcaggccaaatttgtgccaaatttcacactagtgagtgtttccaggcatttattaaaatggacagtgttcattgcaatcttcagcattgcagttgctgaggtatgtggccgctgagtttgtcatcctggggaaacctaatatgatgatatttattccatctaatcctggggctatttggcagtaaataccacagaatacactatttctctggcttatttcagtcttaggtaggctctgcacacctatgcttggaaggcaggaatttcttggtgttcttgtgccttcttctcatggaacgtgcatctttggtgtgtgttgagaggaagggtagtagacttctgctttgttgcaatgcaggatgctggaacaagaggattccctgtctctactgtaagggaataagattttagcctccatccttctctaagaagcaatgtgtctttgcctccaagtactagatgcaggaccatgaactgccccgtccaccagaagcttaaggctttggcttttcaggagcaatcatctagggaactgtgcagggttttcatgtctgtcccctactgacagccaatcaccatacagcctgcataacctaatccatcatcgtctggtttcctgcctcattgttttcatgaacaaccagtagagagccatacgaaagagcttgcacatgagtctttgttccaattgtaagagcactgataggtccttttcccaccaggttttgaatataaaatttctaagaacttattaaaatattagaatgytattaatctattgtttttgcttcagcatgtccttctgcttgtgagtatactaaagagaacagtcataattctgaaactactgtcctgtttgtgtcataaattgcttcacatgtttctgcatactagtagttactcagcttgattttgtctattttcagcaccaactgagcaaacccctgtggtccggcagtgctaccatggtaatggccagagttatcgaggcacattctccaccactgtcacaggaaggacatgtcaatcttggtcatccatgacaccacaccggcatcagaggaccccagaaaactacccaaatgagtatgtctttgatgttacttgtaagaggagcaacagccaacttaagttcctcctagaagagccttgcttcaagctaacttgttaggacaaatttcccttagacccagaaggtgtgtcaaaatgtccagacaactttgcttttgatcaaagagtctgagagaataggtattttaggcttgctatcttttctaatagtctgatggaagcagaaggctacatggagctgatgaggtctttttaatataaagctcaagagatcaaatgatcaaatacttagagtgccattctacaaggctcataaaagatcaatgcactctttcacccatgcaattctatcattctaacctcccttctctgaaatgaaggctttttgccatttttgtcatgggtcacaagtaaataattcacatgtatatgagtatatatataaccaggtgtgtttattcagactagtatgtatatatatacatatatatgttcatataagttagtattcatatatatgttcatatatatatgttcatacagactagtattcatatatatatacatatatatayacacacacayatatatatatatatatatgttctagggaaacatgcaaggtttttatgtctgtccctgactgatgaccaaataccctatagcctgcacagctgcaagctgtatagccatacaatttgcaggacacacacacatacacacacacacacacacacacacacactaacwtataatataatataatataatataatataatataatataatataatataattaatatatataaacctgtgtgaacacactgggttctaagctccagttttctgaagggatatgggttgccagkagaggaagagcaaaagcaagaatgtagatgagaattaggaagtaaacagayatggagattaaaatgggcaggtacatggacaaaaaaccaggtctgacaaaaactggctttctgccataaatgactataaaagatattaaaaaacactttccacatgttggacaagagacagtacaggactgagataatttagaaaaggaaatgaatgagcgcaactccgtaactattatgactttcttcctggagaaccttcctggactgaagggcaaggaattggagccaaagccaaccacagcagtcttgctgaactgaggaaagagactggagtttgggatagctaagaaaatgtgtattttctatgctaggtaataatgagaaagaatttgtggtgaaaaggagctgaaggaatatgcatggaagtctaatataaactgcatatgcacagggagaaattctacaaagtgggacagagaaccactactggggaaaggacaaattcagggaaacagtgagctcaatggtgacgccagagctcacgtagcactgggggataccggggttctgatcagyccgaggagagacacctcattgaacatctcgggcattcagtagagaccccagaaaagtcatactttaggagtaggatttatgccttcttagaataaagactaccccagaaacaccctagtaaagcttaaaaaccaagtctaaaaggacccaaatgatctccaagtaaattaactgcctgacagaagaaaactcaaccatcactggaggtaaataacatgattacagtgctctgtaatgttgcattcacaaggagtgacatcatttaaaaatttatgaggcaggaaaaagcaattagtgtgatccataactaggagaaaaaccagtcaatacaaatagaccaagaaatagtagaaacgatggaattgacaaagaaattaaaactgtatatatgataattgtgttcaaagatttaaagaaaacatgaacatgagggaaacaaatgcagaatataaaaaaaagcaaatgcgtaaaacaaccaaatggaaattaaagaactacaaaaaagtataaccttaataaaatactcactggatggccttaatattagtttatacattacagaagaaaaagtgaaccagaagataactcaatgaaagccatacaatctgtaagacacacacacacgcacacgcgcgcgcgcgcrcrcacacacacacacagagagagagagagagagaaagagagagagagaaaggctgaaaaaaataaatagaaccttaaggatatcagtgaaaatagcaaaagatttaatatatgggtaaagcaagtcacagaaggacgggaaggagatattgggacagaaaaaaatactcaaagcaatgatggctgaagactttacacgtatgaagaaaatgataaactcacagtcaagaagctcaatgaatcagaaatagtatttttaaaagcaaaactctatgatttacttgggtacattatagataaatcrtccaacatcaaagataacaaggataatcttataagccagaggaaaacaatatcatttacatagagggacagtaatgaaagtgaccgatgccttctccttggaaayaatggcataacatctttaaagtgataaagagaaataaaaacagatcaacctaggacgacatgtccagccaaaacaaacaaataaacaaaaaaaccctttaaaataaacgtgatgtaaatacgtattctgccacctccagaggaaacaagsaaaaaaacaaaagaatgtttccaaggcaggcttctgtattaaaagattttaaggaaagttattcaggtagaagaaaaataataccagatgggaactttaatccatactaagtaatgaagagccctggaaatggcaaatggcaatgtcaatataaaatactcttatttatctaatttttaaatgtatttaaaggacaatttgtgatattaattaaaataataggaatatattgttgtttcaacgtatgtagtagtaaaattcataaaaacagtagcacaaataatgcagatgataactggaagtatactgttaatgagttttttgcattatccatgaagttatataatattaatagatggttgaatgtgatagtttaaggtgggatattataaatcctaggacaaccaaaaaaatttaaactgagaggaatggatagtaagaggaatagtccttttatgcaaaagaaggaagaaaaagaggaataaagaatataaaagatatggtgtaaacagaaaatacatagcattattgtagacacaaactgaactaccttatgagtatattaaatataaaaggattaagcattacaaataaaaggcagagattgtaaattgaataaaaaccacagctaagtgtgttctttttagaataaatactctttaagtgtaaagatctactttaaacaccaaaatatgaaaaaggatatataccatgaaaacctgaatcataaataagctggagtggtgattaatggatgcaggcactcctaaagactaataagtgaatgtggtcaaattgaagaaacaaaagtatatacgtgctcaatgtgcaaaaactttttctgtatacatgctatgatcctttggaaaattaaagttttaaagcaatatcactgacaatagtatcaaaaccaaaaaatatttagtgataaatttcacacactatgctcaaggactatacaccttgcactagaaaacaatgttgaggaaagaattaaaagatctaaatatacaccatgcttatagattaaaagactccatatcagttctcgtgaaattgatctttggatgaaacccacacccaagcactattgcaacagtccttttttggaaaaaaaaattggaggacttatataccttaatataaagacttataaaagtacaggaatcaagacatgtggtattggcctggccccttggctcatgcctgttaccccaacattttgggaggctgagtctggaggatggcttgagcccagatgttcaagaccagccttagcaacagagtgagaccctctctctacaaaaaataaacaattagatcgatgtgatgacttgcacatgtagtttcagctactcggaatgctgaggtgagaggattgcttgactcaggaggtctagccatgagtgagcattgatcatgcctctgcattccagcctggatgatggaatgagacactgtctcaaaaaaaaaaaaaaaaaaggatatgtgttattggccaaaaaagtatgcaaacctaaaaagggatggcccaccaccagacccacatacatatatggtaaatggattttccgtatagatggcaaagcaattcaatggagacaaaaatgttttacaaaatcattctgaaccatttggatatccatgatacaaaacaaaagcagaacttgacttttgcttttcatctcaaattattttgatatctcttccacctaagtgtcagagctaaaactgaacctgaaatatgaaagttccatgaaaaaatataaaatcttcacaaccttggagaaggcaaacttttttgaggcaggagtctgtaaacactcactataaaataaaacaaattataatgtgggctttcatgaaaactcatgcttaccaaaagtcattgttaagaaaataaataggcaagtaacacatgagaagaaaaatgctctctgtccatatatctgacaaatggcttgtgtccagaatataggaacatttctcccactcactaaacagaggacaaacaactaatgggcaacagattgaataggcatttcttggggatagatagatgtacacatagccaataagcacctgaaaaaatgtccagtatctcagccatgaaaaataaagagttataatcatcatgagatgtcaccaaacacccaatggacatggatattattaagaagacaccacagtaactgatgtcactgatgtagagcaaggatgtgaaactctctcatatgctggtgaaagtgcaaaatgatacaaccacttttgaaatcagtctgatagtttctccaaaagttcaataaatgcacttttaccctacaaacctgcaatcctgtttgtgaatatttaccccacagaaatggaaacataagtccacgaagacatctccaagaatattcatagcagctttattttttataaccccaaactgtagacaatttcaatgtcaatcaataagaaaatgaataaataatttgtgaactagtcatayaatggcatactgttcagcaataaaagggagcatgtttttgatactctcaaatagtatggaagatgctcaaaaatattacattaaagaaagatgccagataacaaaaatgaacattatgtatgagtctattgatgtaaggttccagaaaggtaaaactaatttctggtgaaagaaaccaatatcatttgcctctggccatgggaagagagtagcagagattgattgagcagtaaaacgaagtttttttctggggtgatgtaaatgtcctgtattgtgattgaagtgtgagttacacaagtgtacatgttcatcagaagtcatcaaactacatctaagatctgtgcatttgactatacatgaaaatatacctcagttgaaaatagatcaataacctccctcatatactatacttgctaacacagccagctgcttggagaaccagcttgctggaatggagaatctgggcttgagactgggtcacatgtatagagtctctacagagacaatgttgcattcccacggtacataatacatttcaaggtttctcagacagccacatgtcatgaatgtgaggattctgagaggttggagcaacattcctgggaggaacgaaggggagcacattctccaagatcccccaccaccggggtcctcaccggctgtgcttttttttttttttttcttgacagagtctcgctctgtcgccaggcaggagtgtaatggcccaatctcggctgattgcagcctccaactccagggttcaagagattctcctgcctcagcttcatgagtagctgggactacagatgtgcgccactgcgcccagctaatttttgtatttttagtagagacggggttttgccatgttggccaagatggtctcgctctgttgacctcgtgatccacccgccttggcttcccaaagtgctgggattacaggcgtgagccaaagcacccagcctgtgcctctyacttactcaattgtttttctgaaccctccatagctggtggaccttttcagatcccatagtctagccagccctctcactttatgccttgggtcccactgttccttcatctcatcccccttctgtcagtcccgcagtggctgtggccagtagaggatggactgagagtaggagaggaggttctgcccaggaacccatcctagagaaacagcatcctgcctgggacctagtcttccaggtcagcttttataagtcttttagactcaaactcacttgacccacctgaagtggtattgacaataatgctattttcatggttgtttttcactgtaaatgcagagccttttagctacacgactagtacagagagtaagggaggctggcctgggaatgatatcatcttggatggcatttcctccttggagaaatatatgttagttccaactcacatgttactatacagtcctgtagaaagagatacagagagttagacaggtatagacgcatttgtatatgcataacaatctataagacacacatcaaaatccgtataccggttcctctaggggtatgtgcttggcagaaggtagaaggagggtattctggttcctttcttttgcacatttatgtatgatctcagtttttatatggagcattgatagggtttggctatgtccccacccaaaatctcatcttgacttgtaatctctataatcctgataatccccatgtgtcaagggcaggaccaggtggaggtaactggatcatgggggcagtttctcccaggctgttctcatgacagtgagagagtctcctgagatctgatggttttgtaagtgtctggcatttcccctacttgcacttactctgtcctgccgcctgtgaagaaggtgcctgtttctcccttgccttctgccatgactgtaaatttccagaggcctccccagcaatgtggaactgtgagtcaattaaaactcttttctttgtaacttacccagtctgtctcgggtatttcctcatagcaatgtgagaacgggctaatacaagcatatactacttttgatattttaaaataaaaattatcatctatctttgaaaggcatgcacaaatgggaagttgaggaacatttgtgttgtggcaattgtatgatacctttaatgggaatatttcaaagacacttgttaagactttgttagaacaaaatgtagagggtgctggatgtccctsaatattcttccgcctcctgtaacttgtattgctttggaatttccagtggcctgacaatgaactactgcaggaatccagatgccgatacaggcccttggtgttttaccayggaccccagcatcaggtgggagtactgcaacctgacgcgatgctcagacacagaagggactgtggtcgctcctccgactgtcatccaggttccaagcctagggcctccttctgaacaaggtaagaagtctgtgtcttaccttgtctagcacatacctctctatgtgcttggacaacgggatgaaaagacatgaaaaaccacactgatgcagaagcctttagtgctacacgggagctcgagtgttggttgaggttctgccatgaccaaggaagtctcagtgccgtccctgggaaagccagagctgtgatttttggcacaacttgtgggagtagtgactttaggactggcgcaaaacctccagggtgctcaacttaaccactcaccttattctaaaatgggttatttcagtgtcccagtcaaattcctattctaacatgctgtcaactgtgtgattatttccaagccaataagcatttccagtaatttcttaaaatagtgttcattgcagtcttcagcgttgtggctcctgaggratgtggcccctgattctgtcrtcctagagaagcctgacatgactgcattgattctgtatcgtcctgggtctatgtggctgcctggctgtctgtaatcatctgttttatttttatttttttctacagaytgtatgtttgggaatgggaaaggataccggggcaagaargcaaccactgttactgggacgccatgccaggaatgggctkcccaggagccccatagacacagcacrttcattccagggacaaataaatgggcaggtctggaaaaaaatgtaagccactttgatttggactctttttccctttgctgacaaatcttttcaaacagaagaggggcagaggaaaatactggaaagacttcaggaggctaagcgtaattagccttagcatggaaagtgcaagcagcacaggccagcaaagccccacgcgtgtgggggttctcaggcctcttctcttttgacatttctttactgtttccattgttgggtgctgtttctcgtttctagtgcttgtcctctaagccaggggtccccactccagtactggtactggtactggtactggaactggtaattatctgtggcctgttaggaactgggctgcacagcaggaggtgagcttcgggggagcaaacaaagcttcatctgtattttctgctgcttcccatcactctcatagctgcctgagctctgccagctgtcagatcagaggcagcattagattatcatagcacaaaccctattgtgaactgcacatgtgaggaatctagattgcatgctccttatgagaatctaatgcctgatgatctgtcatgcttccatcacccccagatgggaccacctacttgcaggaaaattagctcagggctcccactgattttaccttatggtgagatgcacatttatttcattatatattacaatgtaataataattgaaataaagtgcacgataaatggaaggtacttgagtcatcctttaaccatcgccccctcaccccaggtgcacagaaaaattgccttttatgaaactggtctctggtgccaaaaaagttggggaaccacactgctctgggttctagtagtcagagatgccctctatgaggcttaagtcagatttttctagaaaagatttggatgggccatcaggtcaccatgagacttcccttagcctcatgcattctctgtgatggtttactttggggcctatgaatagggaagactgagatataggaaaaaccaaagtgtctgtgttcccccactctcacacccatgtaacataacacttctcacaccagatatggggggatttctcctcacaccccaagcgagtctccagcagataccagctgggtgtcctacaatgtaactcggtcctgacactctatctggagacagtgtcagatcccacaagttaaggctcagtcctacaagactgccccactgcagatgccaatcccaagttscaggctgtgacctgtacttctgcccagctggataaagatctgtttttctatatgaccctccatgggtttgattactttgctagagtggctcacagaactcagggaaacacgttacttttatttacccatttattataaaagatattaaaaaggatmctggtgaacagccaggtggaagagatgcacagggcaaggcacgtgggaaggggctcagakcctctatgccctctccagtgcaccagtccccagtaccctaagtgttcagcaacccagaagctctccaagtgcagtcttgttgggtttttatggaggcttcattacagaggcacagttgattacatcattggccatcggtgatcggctcaccttcggcccctcttccctccctggaggttggagggtggggctgaacagttccaaccctcaagtcacatggttggttcccttggcaaccagcccctggggctatccaggaacccaccaagagttgcttcattgcagctcccttcacccaggaaactccaagggatttaggagctctgtgttaagaactggggggcagagacccaatatacatttcttattctatcacaatatcacaggaagctaaggatgatactgcctttgtgtgtcttggctgtggatggtgcataatgcatggaagtaagcatttctgaatcaacagcaaacaggctttatcaggtagaagacccctcagcgccccagggacaaagctcatcaatgatgtcccactgtcctctgaggctctagctctaagacctccagtgggtcaagctcctggagaagtggcacattctccaaagacccttcagggtcaccacaccctggttaagggtgtggcctcataactccttttgactatgactgatggcttacagcatagaaagaaataactttgtcaaaaaatataataatgatagaaaggaagaaggaacgctcccttttgtcttctaagaatagatgtgaaatgtgtgtgccttrgaatatcttctccctctcctgctccacgtgagctggagcttacatgcctgcttgttttcagtactgccgtaaccctgatggtgacatcaatggtccctggtgctacacaatgaatccaagaaaactttttgactactgtgatatccctctctgtggtaagttgccttctgttttggtaaggaaactgcttccttaatatggatttggaaaaaaaaaarcaaaaaaaacagaaaatggcttttgagctgagtgcttctggggaggagatggctgccctctscaccagagcctgcttttcatcatggccaccttgaacctgccctactattggccccatttgttaggaaaacacccgcccctcccaccacacacacataaataaaataaatgtcaaattcccaaagggcaaacttagaggtgatctaatcagcccgggatagtcccaccgaacccttctttgtctagcgtgggatgcatgaaaaacaaatttagagtcattatgatgaaaaactgycctcttctgcagctgagaagaaaaaaaaaatwcgagcagcaggaaacagctaagcatgtaatgcacattgtaaacctcagatggccatcctaggaaatcaatgaagggtagtgcagctctttagccccagatggcctttctcgtaagattactactcatgagtcccattagcgacattgcttagagactgcttgttaggttccttcctcattgctctgagactcttattgggagtatgaggcttggatcaggggaaggggaattgacattagatcttaaatgattggggtaacaaatccatgggggaaaaaaagccacttgtacttgttccctattttcttcctgctgaccaatcaacttgtctgtccgagttacagaacaccaccctggacttttcttttgtgtaatttggttgcttgtggttgggtctgccatgtgaagggaccttgagctgggggaagaaggttggcctccaagtccactgaagaccagcatcctgagattgcctggggaggtggtacagggcagtgatgaagatcatgggagccacactgcccatcgtcacatttgggccactcctggggagagcaagagggaagaaggagaggttagggtgataggaaagattctacttggccaatattattataatgtggcattgtggtctctggatttagtgtgagttgatagctgacttttttctcgagtgggtgcttttgttctattttgtcggtgctattgcagaagcatcttggtggttcctctacctcaaagtctcttgatggggtcagttccagttctccgcttctggccccatctagtacacgccactgcctctcactgcctgggctctctatccttgacaggctgccttgaatttaagcccagtctgacttacctgcctcaaacacccacagtagtgcctgggactcatgcacctttgactcccatggaagggaagtgcagtagcttcccaggtgcaattctgctgtcctcacccacattgaggatgtatgagaatcaggttcttagagattggagaaagaaggaagaatgggaacaagatttcttccaatggactgtgaggttccccaccttactttgatgtaagacaagtgaggttaaccccaagcctggtgaggagggttcccatcagacacttggaaatcctgaggactgtttcctgcagaaggatgtggttggtgggatattcaggtttgactcatgattgagaaagttagagcctctggttggagaaagagtttaataactatttcatttccaccaacacattcagtacgaataataaataagtaaaaataaatagaaacattcagttttattttgaatagtaggagtagggtataatttctgtagttactcttttagtacaatgatgcatgtttactgtatgtaaggcatactagcagaaattgagctcagcactagaaaagatgattgcattccatgccatgcttcttttttacaaaagacttctatagatagattctcaaaacaacccacagcaaatgaaaagttatttggaaaactcaggttccagattcactggagtgtagaatctctggttggttggggaggaatttcctcttgcagttgttattaataattatatgaataattattaactatattaatatttatagttttgaagaccttgaagggctggagacaacagagaagcatttttgaacaccctctgtagcccctgcactgttgtaggcattgatgggtggtaccaaagatgggacactttccctacctccagagaccttgtgggcttgctgcagagagaaggcagggaggaggaaaagaagaatagaggcacatgtgtgtaaattacccccacagcagtcagttagtcatgggaggctccccagaagaactgtcctgaagctggctgagagaaggcaacatttcaacataggacagttatccttgctacataaaatcacatacacacatgcacatatgtccacacacagagactcacatgcaaaagaatcctttgtgcctttcagtaaactttacatggtttagaaagaacttatatttccttgaaaggagagtgtcctttgttgtttactaccactttttaaacttagaaagaaaaatctaaagagtgtttatsattttaccatttaatttcacctttgagatgtgaaaaactagtgcttggaattcgtcctgaattaaacgacacaattgctaacttggactcaaatgcgacttcttttcccaccttgtgccacagcatcctcttcatttgattgtgggaagcctcaagtggagccgaagaaatgtcctggaagcattgtagsggkgtgtgtggcccacccacattcctggccctggcaagtcagtctcagaacaaggtaagaacaggcccagaaaccatctatactgtccttccatgtaagccccacaaaacccttctacatttacacagaacccacacagctgatgcatcaatacctgcctctctgttttctgaaggaggaaaaaatatagaaaaattaaaaaaagttatattattataggttctctacttggaaaatagccaaaatacaaatctttttcttgatctgggcagttccatcaaaatctgtaggcacagtgatttgcaccaagttccaatacttttggaaaatattgaagatgctctgagggtttctatggatatccattgtctcactgtcagatgaaaagaaagggaagtttttagaaatgtgacactttgcagtgagggaggacaagagcaaacttacctacagtctatcacaggcacagatttttttttacacttttgtgaatcattgaattcaatgccgaggctattcatctattcacaaacacatgaacaarttatgggttgtgatccccataaatgaagagtaatcagtccgaacccacagaacctggacattttgggtatcgtttcagtggaacatgcaattcgtaagttcagtttgcttgggtgtctcttaggaagaacacataggacacagacccatctgcctgcatgttttgcttcctcatctcctttctacaccagggcacctgtgctcaattgctgttctcctctaaagagacttccttctgtaagtttgtgaaatgccatcgacaaacctgatcgcatcgcatttcactctgctgttgagttgatttttctttactttatcgtttgtaacttcttgctctacagagctttcaccttccacatatttcagattcattctttcctaaactgtgtggtggtctatgtcctcactgactatcaacatactgccatcatgcacttcctatctctattcctcttcgttgcaatctggctccaagtggctcacaccattattctgatctatcaactgcctacacagtcctagaaagtaagtgagtcaagaaacatcccccaaaagtaaacttttcaggtaagatcagaagaccctcatgagtcactgctgctcaggatcgtatctggctccttgaagagtgaccttgcatagatcttgtcataaaaaatgaaagagaccttgggaaggtcttgggctggtcacttttgtcagagtccagggctgtggggtgaaagccrcagctatagagcttcattctggagtcacttagctttgctctcctggggacaggctgtgcctattcttgcctcaggcatcaaaaaaagtggcacagatgggcccttctgaaaaatctcactactggagcacagctcgaagtttctactatcctgacgttgggcggtagtcctttgctttgggaatatgaacatgatcaaaactgagtgaacttgtcttcctggctttctgtacaatgaagtagaacaaaccatccaatttgaccaaagycttggcatgttttctttctaggtttggaaagcacttctgtggaggcaccttaatatccccagagtgggtgctgactgctgctcactgcttgaagaagtaygtttaagggaaaactgacatggggtcttatcttcaagacttttttcctccctctcttcctccatcccttctttcttcccaccctccccttccttcctccccacctctcttccttttctggaaggaacactaggaaccagggaatgcatgcagaatcctgaggcagaatttccagggcaattggatgagagaggagggaagtgtttctagagggaatctgcagagggaagacccagtgcaagtgattttttggacctgtataaaccgcaggacagagctgttcactaccagaggcatcaatctgtattgcattgctctagagcaatatctgaggctgaataatttataaagaaaagagtttaattggcacatgtttctgcaggctttacaggaagcaggatgctgtcatctcctctgcttctgtgtgggcctaaggaagattacaatcatggtggagggcaaagtgggagcaggcatgtcacatggccagagcaggagcaagagacagagagagatggggtgggggtgctgcacaataccaaatgaccagactttgcaagaactaagagtgagagctcactgatcaccatgaagatgtggcccaagccattcaagagggatgcacctctatgatccaaacccctttcacaggccatagctccatcactggggactacagttgaacacgagatttaggtggggacaaatatacaaactatatcacagtctctgatgaaacagattgagaacagaccttaactgtcagtttccagcaaattgtgaattttgtttcttgccactcataagtcactgattctgggtggccgagggtgtcagagggacagcgccaagttcatggcacagaggatacctgaaggggctggaccatatttttctcttgacatcctcatcttttctaggtcctcaaggccttcatcctacaaggtcatcctgggtgcacaccaagaagtgaacctcgaatctcatgttcaggaaatrgaagtgtctaggctgttcttggagcccacacaagcagatattgccttgctaaagctaagcaggtactcgctcacctgtggtcttcaccccacgctggtgaagatatttgctttatgtctgggttttatgggccatggccactgcatggcagtggggaggaactgtctatcacatgaaaggctcaagggctttggggacagcatcaatcttcaaccccagccctgccacatgttagttgtgctctttaaaaaggcagaaggattcgtttcctcacgtggaaaaagagataccctgttacccgtaaaacttacttaatgttcaccagttcatccacattcatgatcagggaaaggttgttattccaggctaactattctcctttcataataatatgctggagagaatcaaatgagattgcatttcaaagcgcttgaaaaaccaccatatcgagccatgcttagtgtgggcgcctctaatcactgctattcaggaggctgacgaggaagaattgcttgagcccaggacttcaaggctgtaggcagctatgattgtgccactgcactccaggctgggtgacagatcaagaccctgtctcaacaaaagaaaagaaaacaaaacaaatgaacagaaatattccacaatgtcaaaaaaaaaaaaaacccacacaacatacaatttacaaatgcaaataataatattattgttgtcttctttgattttctctttcctggtgaaattttgttttattaagcctgacaaagtgatacctttgcttacrtcacttaaagttagtctatttggacctaggtgacagtacaatcagctaagaaacagtatttgtaggagaggcaggtttgggacaggtgacaaggcatgtggggtgctcgctgtgctggtggctctggaaggcagggtgtcaatgcagacagggatgagcatggcctggttgggaaggcatggggcaggcaggagcctgagctgctctcctgggcctggtcacaagcccatggcagcttctctgggtctgtgaactgaggggtgatgtcctggaatcctctgacactctaggaaggagagaagggcctttctggctcagcctttataaacagtagctgatctccctcttgctccccagggtcctccccaccatcccagcaaatgtgcaaatacaagatctctgctcctcatggtcctcagagagctggggtgttctgatggcttgaacaagtcacttaggaaatgtggggttttggaggcattctctgataggctgatacgttttgagtttagagttcccaccgcacawccccacacccytagagtstagggcatttagtgctccatgagggaacctgtagagtgaggacatctgcatcacaggctgggccttctagtgtccagaagcagaaagtgtgtctgcttcaaagttggtgctaatgatgatttttggtcagaatacggcatttctcatttccattcctttatccccttgaacttactaaagtagaatcaggtctaaaaaccagagttctaatctttaagagtccctgggattctaaggtatatgaatgtccttggaaaacaataccatttagttcatgcaaggtgcttatttcccatcctctttcatttgatgtctagcattttactgcattcttaccaccacggtttagtaacattcacgaggaggaagtggaggatccagatggagcaacttgctctgggcacacaaggcatttgcaattttataccctcttgatgatgtctcagccagacattctgcccagtcatcaatgccctcttcaattaatatgaaaggacacacttggcatgagattccaatcgtgcacagaatatacatgagaagtgtgcctttgtcatccctactttcaaaggctaaggccaccctcagtttcttgcatgcaactgatgcctttcaaatgaaaccttacatctgtgtagtccataggcaaccacaggcaaatgtgagggtgaaacgctgtgttctacattgttctgtgtcagtgaagcaaggcagtgccagctcagagggctctggggcttcaaggcagggatgcctggttgtaggtactgccacttccagctgggcagtgaaacataactgctaatactttccttacaggcctgccgtcatcactgacaaagtaatgccagcttgtctgccatccccagactacatggtcaccgccaggactgaatgttacatcactggctggggagaaacccaaggtgagatcaattccattgcccacgtaacaaattgtttttgaccttcagtgcatgttacaaaatgagcattttggagatagttgtacaaattcctacccatgaatgtggtctacccactcctgactttgcctggacacctgtctatgtctccataatcagtcttcaagggacttgggcaaggggagcggtgccatttccttgagtctctctcttttttgttttcagaatcttttaattttttttgtaatgattgtatgtttcccttacaacaaaaacaaacaccagtagaggtctttgagtctcttaatcataatttcagcattcatattgcttccccaggtaagtggggttttgacccagccctcaagttaagggtgttagattatttttcatgtgaaattagacagactgcgtttctaaacatggtgcaaaacagtaacgacaaaagttgtaattaaactattcttcttcccaaatacccacatgtctaatgtgtgtgtgagggtgttaggcaggggacctgaagctgggggagaggcagacagttcccatggccccaagtctaggatggcatttggtattggttgatgggtgagagcaagagagggaatatttttgtgcatgatgtggtatcagcacctgtactacattttatggattccttcttctctttgcggtatgccctgacaataattatatccgtcagccttacccccttggcagtaggaaaactraaactgtcttaaagtctcagctctactttctcagaggtgcaggcaagggcactgggagtctggggccctggaaaactgttctgactctgccacttgccagatagacctgaactagacacgttacctctttgtaccacttggctctaatcccttatctgtaaaaccagcattttcaaatggtgctttgcacatcagccttttgcataagctttgatttgataaaatgttttttgtgtttttaaaaagattaaaaaccacaggtttagataatttcaaagtaggcttccctttttctgtcattttcctattatttttaaaacctcacctccttgactccttgttccctttttctgcactgctgagtctgggagcactgaggccagrtaaaaggaaacttggcaaatgaggggcacctatgggtgtgggaggctgctcctggtgtttgcatattttaaartttaaatgctacaaaccactgtgagttaggtattattgttcctattttaccattgaggaagctggggctcagagaaggtggagggtggtacagacaaacctgaattggaaccctggctcctgcctatgggctgtcaggacttagaaaagtcgtgagctctcgctgattgtttcctcagctgatgtgggctgcagggctgttatgggggaaataataagaaagtgcatcaagtgctgagcacatcctaagcactccatcatggcagctcstactactaataaagaatagaattatatctaacatgattctttcttgcaagtgacagaaaatccaactcaaattggattaagcaaaacaagggaaattcttagtgagctgcaaagttttcaggctcacatgatggccccaaatcccaggtcctcccaatcatggagtaggcactatttgggggcacaaaggtgacattcccatggctgcagatgctgtggtgctgtggctgtaccgggaaagaataagaaaggccactctcccaattatgtgaacaatagtctgcccactctgagaagtcaaacttgggtcaccgtcctgcccctgaacccatcactgactggctctgacctgcaccaattgttccatgttggaggtgaaggcaagaccccactaatacccataaggggcaaaagttagatagatccttcaagaggattatgggaggtagggcaaaaagctnnnnnnnnnnnnnnnnnnnnnnnnnnnnnnnnnnnnnnnnnnnnnnnnnnnnnnnnnnnnnnnnnnnnnnnnnnnnnnnnnnnnnnnnnnnnnnnnnnnnnnnnnnnnnnnnnnnnnnnnnnnnnnnnnnnnnnnnnnnnnnnnnnnnnnnnnnnnnnnnnnnnnnnnnnnnnnnnnnnnnnncaccatctccaataccaccatcactgtaaccatcatcaccaccaccatgatcactatcaccatcatcacaatgatcactgtaaccatcattactacccaccaccatcaccactactccaccaccatcaccattatcattaccatcaccattatcaccaccatcatcatcaccagcaccaccatcatcaccagcaccaccatcaccatcaccatcattaacaccatcactatcaccattggtttaatcatcaccaccatcatcataaataaacatcacataaccagggtgtagctgggtgttgaccccagagcccactcactgtttcctctctcccacccccatccacacatttctaaccaccatcctgcactgggctcccagtctcctctggtctcacccacatgtccactgagaaaaggattttcagaacaccaactagaccaggaggagccacatacataactcaggcctgcttatcaactttctacatgttaataatgacatcagatcaatgggtgttctcagcttctcagaaggaggtcaaaattctccccctctccccttcatgtgtccagaccttcccggatttggatgtaccaagtgcagagtggtgttgaggccaaggggctcatccatgtaagtctcatctgcaatcactgggctgatcccgtggccctgtctccagggcgccatcagagagggcttcaatcctcaggttacctgtggcccaccctgccctcagaggtgccatctctacattggccacgagatggcagcacatactcatagactgcattaatttcccagcaactcctggtgggttttccctcttatcaggatgtttgccttgctcagagagcaaatctgagagcagtgacacctaacttaactttcagcaaaatattttgagaagggtgcccctttacacatctgtgcagtccaggtgatgcatcccatgcccaatgctcggtagtcaggaggagcttcctccatgcagctctgcggaagagactcttccacgctgctcatgtaaactccagattcggtgtcagttttctgacaccgaagacaatgatctaagtgcagtcaagggctttggggaaagcaggagagagtgcctcagttctagcctgtgccatgcttgcaaagttttgcaaaattctaatgagagctgggcttgcaacattggaaacttggattatttgtgagagcactgagaaatccctgggcatgtccatctggaaaaacagcatttcctctggcactttarcagaggttctgtttcaatttggcgaaggaaattaagcagtttttcacaaaagaagaactacaaygaggagaattgtccctagtatttcttctccctaattgtcaaggaagtgtaaattagaaaatgaatcaggacaatttccacctactatgttagctaatattttaaaaattgaatatcacaagggtgaggcaaagtaattgttttccagtgacattttccactgtcacacccttttagagaataatttggcaatgttactgtgagatagaaatatgtctatataattatgggaactgagayttcagaaagtaataaggaataagaatgaaatttatgaacaaacatgtggaaggttggaagcaagagtggggccaacacgcatggggaggaagcatttgggcagygactccgcagacccagactcaagctgagctatacaacctccttacgcctcagtttcctcaactgaagaacaggaatgacaagtgcctgtttcataggaccgttgtgaggattaagtgagatataccacattatgagcttgtgcctggaaaggttgattcttagtaaatgatgactattcttttttattgcaataaaatttatacaacatagagttactattttaaccatttttgcaggtaccactgagtggcattcagtacattcacaatggtgtgcaaccgtcaccatatttccaggacatttttctcatccccaaaggaaacctcatgcccattaagcagtcactcctcattaaaatattagttatgaagactgtakcatttttttaaaaactcatgatataacattgattgaaaaaatcagtataggaaattgtgcattatgatgtaatagtaaaagaagcatataaaaatctgaaaaaagtatataaaaagaatagcaattgtatttctcagactctctttacattgtaaaaatcattttgatagcttcaaaagaaaagcaaaaagtacacaaacaacaaccaaccccaaagcagcatgacaaagcccagattgttgaatccaggtcttgggaacataaaatcttatatgacatttgcactttaatgggtcagagagtccagtggcattgggagctgccttgtgttctgcagcctcacggacagacaggaggtccagctccactgctctgttcttctggaatttcctcgtgaacaagctttggcctcagtaaccatttctttcatctttttaaacacaggtacctttgggactggccttctcaaggaagcccagctccttgttattgagaatgaagtgtgcaatcactataagtatatttgtgctgagcatttggccagaggcactgacagttgccaggtaagaaaagatcaatagatcaaagtcttgtgctctcccgtctcagtctcagtcccttagacgtcagtcccaaagtggcaaattcaggaaggttttgtcagtggaagaccccagtctaagtgttgctcagaaactccccagatctgtccctgaatgcatattcagatcatctaaggagacgtcttggggcttgagttccagatccatarcaagggagccgtaagtgccataactacctcaggccactcaccttcctggtgtgtgctggtcaccagtgactgaagtggtggcttttccagtagagaggaaggtagagggtacaggaccgagacaaattacacacacttaacaatgatgtccaggctagcccagtctaaaggaaacaccaagttaggaagcaatgcatgcaggattcacaagggattattttttttcccaggaaaaaactaagtgatgtggttttgttgaatagactttgctaagtacttaagcactgcagatgcttgagtaatatgctcataagttcctttctgatttgaattactgggaaaatgtacatatggataagagaaggatggcatcccatattaaaaggttggcagcttaaagctcacatgaattttcccctacctctgtttagggtgacagtggagggcctctggtttgcttcgagaaggacaaatacattttacaaggagtcacttcttggggtcttggctgtgcaygccccaataagcctggtgtctatgctcgtgtttcaaggtttgttacttggattgagggaatgatgagaaataattaattggacgggagacagagtgaagcatcaacctacttagaagctgaaacgtgggtaaggatttagcatgctggaaataatagacagcaatcaaacgaagacactgttcccagctaccagctatgccaaaccttggcatttttggtatttttgtgtataagcttttaaggtctgactgacaaattctgtattaaggtgtcatagctatgacatttgttaaaaataaactctgcacttattttgatttgaattaattttggttttggtcttcaaaattttcatgctcttttcatcccatctatttttatttttattttttagactttacgtcctggggtacatgtgcagaatgtgcaggtttgttacatagatgtacacgtgccatggtagtttgctgcacccatcaacctgtcatctaattcggtatttcttttagttctatccctcccctagccctccaccccttgacaggcccaggtgtgtgatgttgccctccctgtgtccatgtgttctcattgttcaactcacacttatgagtgagaacatgccgtgtttgtttttctgttcttgtgttagtttgctgagaatgatagtttccagcttcatccatgtccctgcaaaggacatgaactcatccttttttatggctgcatagaattccatggtgtatatgtgccacattttatccaatctaacattgatgggcaattgggttggttccaactctttgctattgtgaatagtgccacaataaacatacgtgtgcatgtgttttcatagcagaatgatttataatcctctgggtatatacccagtaatgggattgcagggtcaaatggtgtttctggtgctagatctttgaggaatcaccacactgtcttccacaatggttgaactaatttatgctcccaccaacaatatcaaggcattcctatttctccacatcctctccagcatctgttgtttcctgactttttaatgatcgccattctaactggcatgagatggtatctcattgtggttttgatttgcatttctctaatgatcagtgatgatgagcttttctcatatgtttgttggctgcataaatgccttttttggagaagcatctgttcatatcctttgcccactttttgatggtgttgtttttttctggtaaatttgtttaagttctttgtagattctggatattagccttttgtcagatggatagatggcaaaaattttatcctattatgtaggttgcctgttcactccgatgatagtttcttttgctgtgcagaagctctttggtttaattagatctcatttgtctattttggcttttgttaccattgcttttagtgttttagtcatgaagtcttctcccatgctatgtcctgaatggtattgcctaagttttcttccagggtttttatggttttaggttttgcatttaagtctttaatccatcttgagttaatttttgtataagtaatgcccttctttgtctcttttgatctttgttggcttaaagtatattttatcagagactagaattgcaatccctgcttttttttttytttttgctttccttttgcttggtaaatattcttccatccctttattttgagcctatgtatgtctgcacatgagataggtttcctgaayacagcacaccaatgggtcttgactctttattcaatttgccagtctgtgtcttttaattgggggcatttagtccatttacatttaaggttaatattgttatgtgtgaatttgatcctgtcattatgatgctagcgggttattttgcccattagttgatgcagtttcttcatagtgtggatggcctttacaatttggtagtttttgcagtggctggtaccaattgttcctttccatgtttagtgcttcgttcaggagctcttgtgaggcaggccttgtggtgacaaaatctttcagcatttgcttgtctgtaaaggattttatttctcctttgcttatgaagcttagtttcgctgggtatgaaattctgggttgaaaattattttcttttagaatgttgaatattggcccccactctcttcgggcttgttgggtttctgcagagagatccactgttagtctgattggcttccctttccgggtaacccaacctttctctctggctgcccttagaaatttttccttcatttcaaccttggtgaatctgacgattatstcttgaggtggctcttctcgaggagtatctttgtggtgttctctgtatttcctgaatttgaatgttggtctgtcttgctaggttggggaagctctccttgataatatcctgaagagtgttttccaacttggttctattctccccatcactttcaggtacatcaatcaaatgtagatttggtcttttcacatagtcccatatttcttggagcctttgtttattccttttcattctttatcctctattcttgtcttcttgctttatttcattaagttgatcttcaatctctgatatcctttcttttgcttgatcgatttggctattgatacttgtatatgcttcacaaagttcttatgctgtgtttttcagtcagatcaggtcatttatgttcttctctaaactggttattctacttagcaattcatgtaaccttttttcaaggttcttagcttctttgcattgggttagaacatgctgctttagctcggaggattttgttattatacaccttatataatagcctgatataactataagatttttttgtaagcaccatcgtaaccacaaagcaaaaacctaaagtagatatacaaaagataaaaaggaatcaaagcataccactagagaaaatcacttaatcacaaataaagatacgaagagtggaataaaggaacgaagggtctacaaaacaaccagaaagcaattaacaaaatggtgatagcagatcttacctataaataattatcttgaatggaaatggattaaattttccaataaaaagacatacagtggccaaatagattaaaaaataagatccaactatatgatgcctataacacactcacttcacctgtaaggactcaaacagactgaaagtaaagggatggaaaaaatattctatgcaaatggaaacaagaagatagaggggtagttatacagattgagtatcactaatccaaacatctgaaatctgaaatactccaaaattaaaaatgtttaagtgccaacatgatgttcaaaggaaatgttcttcggagcattttggatttttgtgtttagggatgcaaaaacagtaaatatataatttgtattagtccattctcacactgctataaagaatactacaaagagactgagtaattataaaggaaagatgtttaattaactcagagttccacaggcttaacaggaagcatggctaaggaggccacaggaaacttataatcatggcggaagatgaaggagaagcaggcaccttcttcacaaggtggcaggacggagtgtgagtgtgtgaaggaggaactgtcaaacacttataaaaccatcagatcttgtgggaactcactcactctcacaagaacagcatagggaaaaccgcccccatgatccaatcccctcccactgggctcctcccttgacacatggggatcatgagggttacaattcacgatgagatttgggtgggacacagccaaaccatatcataatgcaaacattgcaaaaacaattcaaaattcaaaacatttctggtttcaggcattttggataagggaaactcaactcaacatgaggtaaagcagactttaagtcaaaaactgtaaaaagagacgaagaagaatgtaataataaggagatcagttcattacaaatatatagcaattataaatatatattaatatatatacccaaaattgtagtacctacatatagtaactaaaacaaacattaatagatctcacaggagagctacactgtaatataatcatagtagcacacttgaatagctccactttcactaatggacagatcatccagacagagaatcaatatggaaacacgagacttaaactacactttagccaagtagacctaacagaaatatatagaacattccatccaacagcagtagaatacacattattctcaagtgcacagggaatattctccagaatagatcatatgttaggtcacaaaactagtcaaaaaatgtaagaagattgaaatcatatcaggttttttttttagatcataatcgtatgaaactagaaatcaataatgggggaatattggaaaatccacaaatagatagaaattaatcaatatgctcctgaacaatcaatgagtcgaagaagatattaaaagaggaaattttaaaaamtcaagacatgagttcatgtcctttgcagggacatgaatgaagctggaaaccatcattctcagcaaactatcataaggacagaaatccaaacaccgcatgttctcactcataggtaggaattgaacaatgagaacacttggccacagggcggggaacatcacacaccagggcttgtcagggggtgggaagctggtgaagggatagcattaggagaaatatctaatgtaaatgacgagttgatgggtgcagcaaacyaacacggcacakgtatacctatgtaacaaacctgcacgttgtgcacatgtaccccagaacttaaagtataataataaaaaaagaaatatttgtttttgatttatatgccaatcagacaaaatgtgaaaagccctactgaaattaagtatcaccatgaaagataaattctggataattttttcaagttttaacaatgtagctttaattggagaaagctatcatttggaatgagttaatctatcctatactaaaataagtcacttgctttaaaacataataaatatgattttgaattgaaaacaaaaacaactcaagacaaaggaaaatggacacactaacataccaataatttatagtatgcagcaaaagtggttttaagagggaagcttttaccaataaacacttccattaaaaaagaagatctcaaataagcaacctaagattacacctcaacaaactagacaaagaactaactaacccaaaagttagtagaaggaaagaaataataaagatcacatcagaaatagtaaagactaaaaaactgataccaaaaagaaataaaactactagttggttttcaataaaataacaaaattgaccaacttttagctagattaagaaaaacagagaatactcaaataaaaccagaaagaggagacattacaatagatactacagaagtacaaacgatcataagagactactatgaataattacatgccaacaaattggataacttagaagaaatggatgaattcctagagcaaaaaacctacaaagactgactcagaaagaaatagaaaatctgaacagaccaataatgtgtacatgattgtatcagtaataacaagtctcccatcaatgaaaaggccaggacctaatggcttcactgctgaagcataccaaacattacaaagactaatatcaaccctcctcaaactcttcttaaaaactaaaaagaaggaatgctttcacattcattttatgaggatagcattacactgatactaaacacagaaaaataatacgctaataaaagaacattacaggcaatatccctgataaacatatgtgcaaaaatccgcaacaaaatactagaaaactgaatccagtagcactttaaaaagatcattcaccatgatcaagtgcgatttgtttcacgaatgcaagaatagttcaacttacacaaataaataaatgaaaggatggatgataaaaatgtgtatctatatatatatgttttatacacacacacacacacacacacacacacacacacagaggaatattattcagccttaatgaagaagaaaatcctgcctttgcatcaacctggaggacattataataagtgaaataagccagacacagaaaggcaaatactgtgtgatctcgcttacatatggaatctaagaaagtcaaattcctagaaatagagagtagcttagtgattgccagagccgtggaagggggaaatggagagatgttgatcaaaggatacaactgtatagctttgcaagataaataggttctggagatctaatgtgcagaatggtgactagagttaataatactgtattgcatacttgaaatttgctaaaagagttgatcttaagtgtcctcaccatataca

SEQ ID NO: 1606 - DNA, 816609 bp, Homo sapiens
  misc_feature (1)...(816609): n = A,T,C or G, or insertion/deletion polymorphism (see Tables 1-2)
ctagttctggggaggtcagcgcagggcagggcagggcaggaggtgaacagaagtaggaatatctaggagagccctcagaggagtatagattgttggacacatgtgttgccaatttcatacttttccaggcagggttatgcctaaagctagaaagctgctggctatttattggctgacttttccagtggtcatgacccagcggtagaagcattatattgtacctacaacttaggaaggtttccrgttgtcttgttttcacaacaggagattatcttgtcaccactttcttcagaatagcgatttagatgctcagtgtccatgacctttagttttccaggtcaggcatggtagttccattgacttcttcttgcgtcctttccagttttccttcaagctctgtgctctccatataggcttgccagggttgactttttttggacctgtgaccgttgttaaggtctgactagacccaagcgtgatgagaaagtggttttcttagatcttctaagtacaatacaccagtaacatattttagttctaggacagattgttagactaatagtatccctgtgcattcttatagcacttggcagtttataaagtactttgacacacattatattgttggatttcacaaactgggagatgggggaaaatcattccccattttagaaaccaagaaactgagatctggttaagtgacttgcccagtgctatacagtgagtactgggggaagtaagactagaatcagtgtctcctaggactctagaacatctcactcccagtcctcattatcaaatcagggttagtttgagatccagcatggcctcctgcccccatggggcatggagtaagggaaggaacataatggcagtcctgcatttgaattctygcctgagactttagacacagtcatataatctttctgttttcaggttccttagatcctgaatggaggctgtgataccatcctcatagttgtattttagagggaaatgaaataatgtgtctgcagctccaggcacactgcaggcaatcagtaagtgttgatgtcacccactttctctcttcttatctgatacrtattataaaaagtagcttctcattactttaaatatggtctttttgtgcaatagctgtgttattggaaaaataaaggcacaaattgaattctcctaaatcagatttttttttaaatgcctgggatttagctatttaaaggaaacctgtggtgaattcttctgtaatgcaaataattactttccaatttatctgtttagtaagtcgagcttctcctgtatcagattttttaaaatatgaggctggcttgtgtagaagagctttcacaatcctctcactgatgaaaaaaagtcactcaacttgcaaacaaaatcagttattgtgttcagttggcaaagccttgctctgatgtttgagcataatctcatattcccttattattaagyaatagaatctcagaataggaagctggaagacaccttagagatcaygtggtccatctcactcgtttcacagatgaggaaatggaagcacataggggtgaggggacatgttcastgttaccagccagtgactgtcagacaaagatccgattccaagcgtctgttgccaagggagagctctgtctgccccatcctcactctgccccaccaagaatccatagacatgcacacatattgcagcatgggagatgatacagaaatacgatgcattttcaaaacaaccaaaagagctgcaagtgtgagcagtcatatgaattgatgagaatattcagcttaacctttttgttaaagagctgaatggaatgcagcataggaatgctgctttggcctttttatgagaaaaaaattacaattcttggataatggtattcctcagtgaggattttaccctatcatattttaatcatacctgctaaatgcccaaggaagatgtgatggcagacccagagagaccctgcatgcgttggtgggtgtgytccacctgacatcaccttgacatcaacctggccaggagacctcatttggagcagaagtgtttggacaaaccgcattggatcttctcagccctttgagagattcagaaatcacctccctggaaatgcccccagattgtcccttcctaattaatatgttaktgttcttccagagctaagcatygaagatgtgcacctttctgaaagattgcagtggaggggcagggccattccctttccttgtgctgccacagtgagtccctgcagcactggggtctttctccaaggacaggacccaccttctgggacagatgactttggtggcactgccacttatcagctcacgctctcaggggttggggccatattcaatccctctgagccttcttttctcatttatacaagagctaatgcctggtgtatgaaaatttatggagatactgtgttagatacttgacactggtacagagaaggtgtgtagaaaataaagcagaattctgggctctggccagtgaggaggtatccttctggccttttaggaaacagagcacatttagggggatacaggctcggggtccagccagggtgcctgcttccaggagtcttaggccaggggactgcccatggagggcccaatgatgtatgatgtgccctgtaagtaagggtgggctggygggggagtgcacaggaagggctatgagggttcatggttaagcctccccaaagggttccacggcctctccctgtgggcccagacatagtgctgagaggatttgtccccctctgagattggtttcaggagtccagacctcacgcctccttgaaacagtccagcacagtccccgcttctgccacatgtcagaggcaggtcagtttgagagaggagctgtttatactttaaatcaaacacaaaacatacaatagaggtatttggatctatagctctgaaagattgtgatttgtttaaaactcacagactccactaggatgagyttggattaaagctcacaagaattgtacaagagcaagataagtaatttaagattatacaatgaaacctaactgatgtagtttctcacaaactttcaaatatatttttccttaggttttttaaaaggggaaactaaaccttctggcagtggagtctgatttttatgacaatgtatcagattttgaaataaatggaagatttaaatattttataagtagctctgattttattttttamagtgacaaacgaaattcagtaaaagctcaccaactgggcaaatacagaaagagttgctctgctccagtagaaaatraattacagactaagttagcaacaataactcctgtttaatgagccagatactatgctttccatgtgtgctgtgtggcaggttctatcacctttacagrcaagraaagcaagcttcagagaggttacatgcaattaattctgtgttccagagacggaaactccagcaaaaattcaagtgagctgtccaataaatgaaactgaaatgaaaccaaaactgaacctctagttttccatttcagtgcattcagccactaaacaaaactgattcctgcctcactgctattcattccccaatctttttttaaaaattaaagctccaaacaaagctatgagatgccaaagagagtaaacaatactgcaattaccaataattttaaaagcgactcaattttattactttctggactgtacagcaagtggaactaggttaatgccacrtggataggtaaggatgcattgtgatgaacagatgggctgtttgtatgttcgtctataattgaaagccatttattctcttaagtgttttaagtacttgggggatggcttggtgtaaagaggaaaggtggtcccmagacccatccactccccctagacatttctccttcaccttatttattcatttagtctgtactctgtcagaacaagggtcggcycagccacgtggaattggtctcaaattctcaactagtgatcagagttaatgaggttttactatcatgtgactggttttccttgtgaaactgttaaacacaatcttacttctcttaatgggtggccggtgtaatttatggcctatcacttaaatggtttcatccagaaaatcaggttgactttctgagtgtttccttttgtggaatgcctgaggtcaggctgttattgaatcacagattttctgagggaaaagcagctgctaggagaatccagtgtgagggactaaacagtgaagtggtgagaaaaatcagaaagtattttgggggcagcacagaggaaatctaaggcttaatgtgtgcccggaggcagggaatacttgtcttaggctgcacagaactatctcagccgagtgggccattggctggctaggctgccaggtgtttgctcagaaatatggggcagtgggctgctatgagccctcttttctaatctgcaagtgcaaaaaatgcagctttctttgaaggtgtttgggcatattttcagttatcccccagggaagcaccatctttcctttyggggcaagaaggataaaaagaaaattttatgaactggaacttgaacaagtgaatggaaaatacaagcagatgttggttggctagggtacaggagaactgtccaaatttcaggtttcaaacccatatataaataggttagraatgagcattagattaaccatcctgccaaagtaaattggtgctgtttattctcttaattagctgtgcattacaaatctcagattccctgtgttaagtcagttctcattttcagtcacatctcttcaaaagtcgtttgaaaaaaatcttacggaattaagggtgaaggccgtaggaaaaaggctttgtctgtagatttgcgtgtagcctttttcacttcaagttatttctagtcttgatgaacttttccccactgagtcaggcaaaattaggcagctcttcaattgattgmcaactctgatttgctcctagtgattctgggatcaaggcatgtttccctcagaactgttaatatacccattgctcccacaccgacaaattaattggaaaccctgacaatggtaataggaatatcttyacatgtcaccttacctgtgtgtttcattttcaagtctttgttttcttaccagagaataagacaatttatatgaaatagctgactttctatgttaattttttttcacaagctacaaaacttacacattttttagctctttgggtggatttctttctctctttcactttgtaattgaataatcaytttttcctactgggtaatttgaggcactaaaaaaaaagtcatyaacagatgactggcttgttgaatacatcacagaaaataatatttattatgattttgttgacaaaattagaatgctaaattcagatagctgcaaaaaaaaaaaacagatttgaaaagaaatggtgccatcagttgcaggatttttaccttcatggaaataaggtttattgaaataagatgataaataaaagtgctttctggtttgggagaatcaacctacttcctgatactgttctgtttctcttgctccaaaaatatgatcaatctccctgtttagatgcagtgcagccaggtgttcagaatcacagggggacaaaaagaattagtttcttactgaataggggattttttttttaagaggctggcgtaaacagggctgcaaaatgtgaaacatgtagacccactgaactgaacccccttttttcccctcttcccaggaataattctgctacaaggctgatttcaaggacatgaattgttgacctcatcccaacatcagaacctcagatgttctaatttttgcaccattccaggcaagttgatcttataaggaaataaaattgaaccttaggggtctgatggaaattcactgtgacattcaaatcaagaaaacttgctaatgcccacagagccttttccccatgggccctgatggtagcctccagaaggtgcagcctcaggtggtgccctttcttctgtggcaagaataaactttgggtcttggattgcaataccacctgtggagaaaatggtatgcgagggaaagcgatcagcctsttgcccttgtttcttcctcttgaccgccaagtkctactggatcctcacaatgatgcaaagaactcacagccaggagtatgcccattccatacgggtggatggggacattattttggggggtctcttccctgtccacgcaaagggagagagaggggtgccttgtggggagctgaagaaggaaaaggggattcacagactggaggccatgctttatgcaattgaccagattaacaaggaccctgatctcctttccaacatcactctgggtgtccgcatcctcgacacgtgctctagggacacctatgctttggagcagtctctaacattygtgcaggcattaatagagaaagatgcttcggatgtgaagtgtgctaatggagatccacccattttcaccaagcccgacaagatttctggcgtcataggtgctgcagcaagctccrtgtccatcatggttgctaacattttaagactttttaaggtaggtaaaggcattgtctttctgaccattgtgaaagaacaatgaaatgctatgactcctactgcaggtttaagaagaaagtgaagatggtgaaggtgctcatagacccttttggtgttaccaggttcctcaaatgggacattctatatggggcattctacatgtattggtttagttccattacttacaattaactggattaattttgactcttttttttttttcctgaacaaagagaaaggtgaaaagttctgtgatatattgggtccttgtcatcttgggataacctctttrttaggctcattttaaattaaacaagcatttttgaagagaataatgaactcagcgcatttatcatggaaaacatttctatggtatttgagctatttaatttactgagtgaaacttctttaaggtgggatgctctgttatgacaaaagtttgttcatgaagaaacagtatttattactaatgtgtagatgggagtgacactctgggagatgagatggtcataaaattgtcaggcttattataactacaatagagcagaaccttattaattcagactgctctgatacagacttggaataattatatataattcttattgcattaaaagttcaaatttagcaggataaattagactttttgatttaggtttggtgatctattacccatatgttgcatttacatattgaataaaattggaaatatggaataatatatgtaaaaatactttgaaaagtataaagtgcagtaaaaataaagttattgttaactcacyattttcattaactttctcattttatttattaataaccaatatgtagtcttttgtaatagacataatttgtttaattgaaaatactttcactctggtttcttactcagggggacatgaatttttcaacttaatctgaattaatgagcctttgttttatattgtgaaaaatggttcctggctgggtgcagtggctcacgcctgtaatcccagcactttgggaggccaaggcgggcggatcatgaggtcaggagattgagaccatsctggctaacacggtgaaaccccgtctctactaaaaagatacaaaaaattagcccggcatagtggcacacgcttgtagtcccagctacttgggaggctgagggaggagaatcgcttgaacctgggaggtggaggttgcgatgagccragatcatgccactgcactccagcctgggcaacagagcaagactctgtctcaaaaaaaaaaaaaagaaaaaaaaaaggtcctatgcacattagatttagaaatattaaaagaatatggagaagttggacagatgacaggtattgtgacaaatgtgaacaaagtgatgggaaatgtcacacaaaagatgaaaggaattgaatcaaaggatttctggcttggcagatatctcagaggcacatctagtctggcccactcatggcactggaatcctctttgtaacacccccttgagtggctgtgcagcctctgtatggatttccctagtttagaagagaaaatgrtatgaggcaacttaatggctattttcagatagatgaaattttctcaaataaggaggatgctaagcagaagctctctgcgtctaaggagtactgaagaggcacaaacaggcttcagggtgtgctggagacatttgagcaggacattaagaagcgcctcttgacagtgagaaggacacaattaaaacaygtagccagagttgctctagttctccatttctggaaaccttcaagggaaactaggcagttgttaaccatttctcttagtaagagggactccttgcttagagggaagatgtggaaccagaattctccaggcttcctcccacatcttgggatctagtattcctcccagctaccccggttctgtgccatatggcattttctgctctgggttggtgtccagctcagacatttctgtaactcttctctctgatttgaactccctcctcacctgctccaaggcatctcttttctatttttaacttagcaactgtggttcaaaaacatcacttttagaggagaggaaaagtttcctaagaatcttctccttttggtttccctctccttataaaccaattcgggttcctgycaataccattgtaattcctgtgaatcctggctgtttcctgtagcctggtgcccagccaaaagtgggcaaagatttgaggagtgtggtggaggagataaggtattcatatgaggttttccaagcttgtttgcattttttttttttttttgccatagaatcagcyaatctgcaaaatgggaataataagattgtgttagattgttgggtatatttaatgagaaaatgcaggaaggcttccatcaggacctggtcatgtcctttggttttttgggctattgaaggaaactccaggccacctgaaggcaagagggtgttttgtttttatgcagcggggatctggcttctctcttctctattcttccctcactgactggttagttctcttaatttcttgggtaattctggagggaccccatctgactgggtgagagggttactactgactctctgggcagagyccaatgccccaggccatctcttgagacacccaccaacacatgaaagggcagctcttgctacccttaactgaagtgcagggagtgggtgggtcacttatcgccaggagggggtgctgttatggtagatgtcatgactaacatgatcggttcactggtccagagtgcgcgtttaacctacagaagcaaatctagttattaaccaagttattggacttgaaaatcgtctgtaattcaaaagtccgtcagtgagatgtcagtgcctagtccatcttacaggtgattctggaaccataagaatgtgaattagataatagcaacttatgctactttagtttgatttttatgtgactttcaggaagcactccatttgtagtattaattataaagcaattgggatagaaaattgtctactctatgtatggatgacttctgtttatacatatatgctaggatggacatgaaatattagaatagttatcagaggaatgattagcagttaatgcattggagattggcatatagctcctttttgaaaaataatacttttcttaaatactaattttccaaaggttatgacttgagtaaaagtaagttttaggacagttttctcaagcttaggccctttcagggtagcaaaagacccacagaatctaaaaatatgcccagaaattaatgtattgctagttattcccagataatggagttaaagaaggtagagcatctccactgaagatatrcaatgaaccttgatcataaggaatacaaacagggtcttaattcatgaacttactcactgtcctactcaacaataaacataaattggggttttaagaatgtgattgcgatgtgtttaaaattttatggaaaatatttgggccaaatttggaagtgatccctaaatgtctcagtttcctttttttggacaactttaggaaggccatgtattttacctgcagtatcttcctgaactaaaatgtgaaggagacaacatcttccatgcagccccatttaccactttcttcagtcttgctcctcctgtgtcagcctctccagtccttgtattcctaagtgttctcctaatcaaaacctgatgcaagggatctaggtgttgtcagctatctctatgttagtatgtctgtgtttaagtcagaggagcattttatttccttcaggatcactaattgtggaattaaatgggatttgtctttgcaaaggagatgctggcatcagttggggaggttcatttagccccaacagagactgcacttagtggatagccacctcctctgctggaatacaggtggccctgctcatctgacctagagggaagtggtgtcatcctatctttgtttcttttcttatccaagctcagaagcaaatgaaaaaaatgggcctctttaactttagaagagggttgaataagggcctggagctggacacaacctgggaacagaagatgccatgtggcgtagatccataggatactgaatgctttactagattagtgatactcaacctcgagtgtacggtggggttcatactgctgttgcctcacccacaaggggtgtgggctgcattattaaaactacctgggaggcttttcgaatggcaggatccagtgaatgatgtgtgcctcccaagcccctctctgggaactatttttattgagatgagtgtctcatatccctcaggtgtgttgggagtggaaacaaatttgagagttacagaacaagaatttaatgatctgaactttttagatgcactagtgtaccctaacacacacacacacacacacacacacacacacayrcacacacacatcgtatatcagctaacatggggcagagcagacctaggtgattgcttcactcatataacatgctaatggctttagataacagaagtatcaattaggataatgtgacatgtaacggtagaatagcagacccagaacagctccatcctatacagaggtataaacgacacctcaggggcttttgtactgcagacaacccagtgaaaagaggggtccagctccccataagagattgtgtagttttgaaagaatttaaaaaggagagggtctttggaaatgtttgagaagcccataaatttgtgttttataaagagctcaaattttttctcctttctagaacatttcctctgctctcctttaaattaaagcaaattgattactccaaacactaatcatatgtcttactttgagcaaagattgaatattctaagttaaaaatagcacattgatgctggaggtaactcacattaatgtccacaaaratgcactgggttgtaagaggacactgtcaaatataattcctctctcttttgtttttctagttaactttacctggattgttaattttctacccttgaaggataggggttagatagtctgtagtgtatccttcccaaagcaatcaaatgagacttttaaatagaaatccatttgtgggtgggctagataatttcaccctatgtggaagtgtgctgattataaatggctaaaattgatcttcatgtgaagtcaatgaaatactgagaagcagcttgtttccctggcagtcttcgcctaccctgctatgtttatgaagatatattttcttccaagagactccaccaattgtrgcaaccacttctataaagycaagcatttttttgagttatttattgcatacaatgggttttattagcttcaaaactttgaaaaggtaaatctgccatatccgggctcatctagagatgaactcataaatgagtgcagtcagtaaactcagtaggaggtaaatttcatgttcaatctcatttgatggcaatagataatggaatattgggagatggacttcttcagtcaactctttggtactgtagcagggtttcatttaactttgaaaagagctcactctccttaggtgagagaggactggtaagtagcacttaaactcccagctacagagatctttcaaaatggagacttggtaatctctttccccttcttaaaactctttaatggctagggttttacccaggatgaaggtccacttccactttggggatccttttctcactttccttgactagattgtctctttgttacaastaacaagcagcttgtgcttcctctccttaatgtctctctcactgggttgtagttgtttacctacttgtctgcatsccccactagactgtaagcaccatgtgggcaggggcatgtctatctagtttgttgctgtattcctagcacctagcatgggcctgtcagagaaataatgaatgaatgaataaatcatatctctctactctctccctcatcccaatctcaatgttggaaatatgtgttgaatagataggaaagaagtataattttgtttatttttcttgtatactcctttagaaaaaggagggcaatatgtttaggctttgtgtccccacccaaatctcatcttgaaatgtaatccctataatccccaaaggtcaaaggagagaccaggtggaggtaaytgaatcatgggggtggttttctccatgctgttctcgtgatagtgagtgagttctcacgagatctgatggttttataaggggctcttcccactttgtttggcacgctccttcctgccaccttgtgaagaaggtttcttgcttctcctttgccttctgccataattatgagtttcctgaggcctccccagccatgctgaactgtgagtcaattaaacctctttcgtttataaattacccagtatctggcagttccttatagcagtgtgaaagcagactaatagggagaagcggagaaagaaggaaacatgattatattttgagagttgctattttcatgtgctttctctttttcctacaaatttccatttaaatgtatttttaacattaagaaattgcgtgtatatttcaaaattgttgaaagagtagatcttaaatgttttcaccatacaccaaaaaaaaygtgagatgatggatttgttaattagccaatttaatcaccccatattgtaaacataaaccatcacattatgccccataaatacatataaattgtcaatcaaaaataaagtaaaataagcaaaatatatgaacacattctcattttggaaggtttaagcaatacatagtatgaaaggaaagtccacttccaaatgcataaatccgttaataacacatgcacacatgattttattaacagatatgtgatttatgactttctttttcacttaatatgtttgggaaaattttccatgttggttaatacagatgtactgcagtaattcttgatcctggctgcatgttagcattgccagcatagcttttaaaaattatggatgcccaaaccctagccaggaccagttaaattggttggtgtagagccctgcattggtatgttttaaaagatcaccaggtgattctgatgtttggtcaagaatgagaactgcaggactttatttttttaataattgcttggtttttaatcatatggatggaccatactttattttacaaatctctgataaacaagttacttccctttgctcttcaaatttgttttttgaaaaacagttgaaacaatgctagagcctcatccgaatactattagctctagaatgaattttggtggtgtagggccctttcttggaccaacaaaggggycagatgagtgaattgctgaaagcatcttgctgtaagacagggtcacaggacacaacattccaagtcatgtctcttcgaaacatgcaataacttagaatcagcatggtggtcatatgctcagacagttcagggagcaccatgactcttgggcggagcacattttaaacttggtgaatttaaatttcttttctttcccctagccttaaatggcctgaaatcctgaagtgaataccgaagacatcttaagagcgtgcttttagtgataaatgcctatgtttggggtgttttaaataatgaggttgtttgaaaagtagtgagaagtctttccataagaatggtttrtgactggatgttatatattttggtttacaaaattgtctgaaaacctttctagaataagtcagggtctatgtaaataaatctgcataaggaaagtactgtgctctttctacccattcaccctagagactgcaggtttttaaattttatggacttcacttcagagcagttttaggttcacagcacaattgaagactgcagcggttttaacacaggtgtcttcctgggctcttctcatagctgtttgcaaccaaaggtaatgccttcctaggaagacttaaaatctgaaggctgtcctgtgctcagtccaatggttatcacactgtagcatgcgagaaatcacccagagtgcttgttgaaacacgcgttcctgagcccacctgcagagtttctgattcagtgggtccggggaggccyggggtggggtctgagaactgccatttctaatggttcccaggtgatgctgatgctgctcttttgcacatcacactttggaagcactgctccatacaaattgcttgctggctgacttagcaagtcaaagtgtgcaaaacaaaaatgagatttaacagtgttctgtctggcagcagcttttttcttttgacacacacctggttggatttctgttcatattggtcataatcacagcagctgttgtgtggatttatttttaattgtgttcatttttgagttgtgttccttattaagtaatgcatagctcatgaataatgatcagtgcaatggtcacttaaacacaatttcttaaagtagggtcaggcagattaccattttacacatttttactacctgagacagtagagcagactgatttaagaaacttagattgtaagatatacattaattgggaattgagaacagtaaaagatgaaagaggctatgatttgtctcagctaccagcaatttgtcttcagaaaccatgacagctacctcctgatttccattatgcaatgagattgcaaataacattccacagcagtcttaatcaatagagggtcacaagaggcccttgcttccccacagtgggaaaagggcttatttacccatttaattgatataacacactttctggcaaaagagacatctcttttagctgtaattgggggcttttcctatccccaaacactgtcctcacaacctgcgtctacacatctaatctttatgtatcttgaatacataaggaacaccaggctggcaaggtgtaggrgtctaggcatagcattgtgcacagccactgttatctgtttctagaatgaggtcagtctctgctgtattacttcattaggctcagcaagctaatagacatgtgttctcaatgttggccattagtctccctctaagacgcttcaaggctccctctgggattagggaggctggtttccttggtgtaatacagccctggcttagtcccagcttcagggacaccatggatctgtctctgtatctcctgcagtgccactgaggctyctttgggacatgtggatggtgacttattcttgctctagtgtcttactcttgcttcctctcacatggattgagagtgacctctagctttgactagtgcttgtactatttctttatgttgtggcaattytatttgttagttttcagagtgatttatcgtctcatctcagagtgtttgaacttatattatttctagaacaaataccatgtcatactgatgtaaatttcttagatatttgcgacttatagatattatgtttgttattaggagatgtctgttcaaattatagattattttaacgtatttatctagtggtgctgatactcgtgagtaaaatagattaatatgaattatatgaaatakgttgggctctgtagtcagactgcccgagttcaaactttgacctaatgcytrttaactgtgttaccttaagcaagataatttatctctctaattcttaagctttcttatctgttaaacaacccaggctgggtgcggtggctcacacctgtaatctcagcactttgggaggccgaggcaggtggatcacaaggtcaggagttcaagacaagcctgacaaacatggtgaaaccccgtctctaaatacaaaattagctgggcrtggtggcatgtgcttgtaatcccagctactcaggaggctgaggcaggagaatcacttgaacctgggagacagaggttgcagtgagccaagatcgcgccactgcactccagcctgggtaacagcaagactctgtctcaaaaacaaaacaaaaacaaaaaaccccagttaataatagtacctttttcataaggtttttaatgaagacaagtaagatatagttcagagtcctaagcaaaatccctgctccataggaggcaccataaatgtttgttatgatgatgataatgaggaggaagatatttacatctgctattaagaggatattcattttgagtggtacctctcctccagtttctcagccattcagactgacttgccctattttgtgaacaaaggcagattagcattaaaggtatagtcattggtcaagaaacagaactgatgggccaggtgtggttgcacacacttgtaatctcagcactgtgggaggccaaggtggatggattacttgagcccaggagttcaagaccagcttgggcatctgagaccagcctgagcaacatgacaagatcctgtatctataaaaaatacaagaattagctgggtgtggtagcatgcccttgtagttccagctactctggaggctgaggtgggaggattacttgggcctgggtggttgaggctacagtgagccatgatcatgccactgcactccagcctgggaaacagagtgagaccctgtctgtctgtctgtctstctctctctctctctctctctcwcwcacacacacacacacacacacacacacaaagaagaaacagaactgatggcaggtctagattggctctggcatagggcaagcctatctagttttcttgaaggccaaacttgagactagracttcatcagctcatgttccagccaagtgagctaagaaggtggtgtactgctatccttccaaatccatgtgttgggtggtaagagtcagttttattcaaaaaatggaagacccagagaaacattagttttctatttttttaaataaagttgcagtaaattttaatatcgtttcagcgccaaaagaaaaatacccttaggattcaattgtttaaaaaaaaaagaaaaaraaaaaaatcaccaattctggcttacagaggccacaggtttgatggtggagttgtggttgagcatgaacagctgaataaccccaggggtgggtggcagccctcaagcctgtcctttgggttggaattccctttcttttccatgtgtggtaaggacagaaacacaggcctgcaccagatgaagaatgttaccttttgttgagggaataatttttttttctgccagagatggctgacatgacactaattcctatcatctctgatacaaatgtcagaaatgaaagcactaaaaggcttcagaagtacttgttctagaagtcacattcattttaggacaatcagaaaaacagtggaactaaatgtattctgattcacactatgacctatcttgtgccacctgtttaaaatgtgactaattcagtcaaacatatcaattatgccctagtaaattctcatttcaatcaaatatggataatttgctcaaatgtaaaaggacttcacagggaaagaaatcagtgcagagtttaatgtggtctagtcctatcctagcattgtgaggcagtgctgaacagtgcctggtatagcttctaaacccagtaagtgctaaatcttttttttttcccccatcaagagaagtagaatagtgtaagagatgctagcatttaacccacctattctccttctgtaacttagtaatacaggtaggcaggtgatattcaatcaacccaccaacaggtctatgcagcatcccataggtatatgccgcatgttcgacattgtagtggataatatgaaagaaaagaagactctaagccatcaatgttacttgtactgtagttgaggggaaatgaccaaaatcctgtaaaataaccacgagcaatataaaacygtgtaaaaagggctacagtgtggtcctggggtttaaaagagaggctgacttcatccaaggaagctgcagttatcagccaaggtttctcaatcagctctgttataggctgctgcaacagaataccttagactgggtggcttaaacaatagcctttttttcccctcacatttctggaagctggaattctgagatcagggtaccagcttggtgggttcttggtgaaggccctctccctggtttatagatgctgtctccttgttgcatcctcacatggtgctgaaagagataagaaaagctctctcctgtctctccttgtaagggcgcttacaagggctccacgcttatgagttaattacctcttaaagatgccatctttaaataccatcacaatgagggttaggatttcaacatgaattctggtkggggatacacattcattcyatagcacaaggcttcatgcagtaatatgggattgggctgggctgggcttaaaggaatggataggagtgtgcaaactgagaggccgggagaggaggaagagtcttccaagactgggaatcctgtgaacttttacctgatgccagctcatgttcagctatgtgggggtggaagtatgtggaaacctctttccctctcacagcatctctctgctatgacaaaacttcaaaggattatyttaggagtctctaggaggattaaaaatggggaaggttggagtgctgtgttcccaacttccattggacacaaaactgggggtcccagtaaaaacccaagccagtgagcacagagcacccagagggcacaatgctgtaccctcttaatcagcattgtagaacagctaaacaggggtgaattgctgttgaatttaaggaaagtgttatcaaacctaggagaatccctccccccaaccctttccccatcckttgcactctgggaatccatgtaactcaggataaaacattttgctttatttttcatttgccacatgcatatcttgactgtttacacggttatcattcaatgtagatacacaattaattgytaagaaagaaattaaatgcattgtcaatgaatttattttatttacttcattccaataagaaaagccaccattcttgaggggctcacggttcttttccattttcctaacccttgagtatacagggagtaatcatacctacactgtctcagtttcaaaaggtggtcgtagatctcagcaaggtaaaaatttgagatttgacaatattccaagtgtaaagggttttgatttggaaataaattctgtattgaaaatggcataaatgattatttttcttctttatgctgcagcactttaacttgtaatttctaccctggttaaccccacctatttaaatgagagctcaatgtgagatcttttgttgcctttgaaaccactggatagaattttaaatccttggatatttttcctctgcctgagaaaggaagatacaggaaatttcattttttagtttggatagctttatttcatttatattcatgtagcccaggcatctagtgagttttgctggtgtataaattaatatttacaggtaaaaycttgctgaaaataaaatagattaagtggagaatrtttttcccacagctttcgtctctaacaaaaatgaaaaaacccagcaccactcctttaccgaatgccccatctgtcagctccttgctgctctgagccaacatcctctcgggattgtttggggccaagggtctgcatgtggagcagggtgggtttagcacatgctgggagaatagggattttaattaagacttatatttacccttaaatatttctgtgaattatggagaactcaaattaaaacctgtatctttggactgaagttacagtaaaatttcagcctctgctgatcagtggtatgcatagtatgtgataaattttttcagatattaaatcactgatctaaaatattgtagtggtataggattgatgaataaatattattttaacaccttatttttaaaaaatgttatgatgtttaaattaatagcgttaatatttcattccagtaaagtggtacaagtttagattttgaagtaaaatatctgcatgataagaattccctcaaagaatctatgcccatctagaaaatggttcttatgaaagaagacagttttgcattgtactttgttttaaacaacctagaatgaagttctagtagtagagttccatggttttcaaataaaatggataataccctatgattcatggatattggacattttaaagatgttttaggaagcttggcactaaatagttttttttttaagtgattatttttcctaattctccaaatgcctggaatcatgaaaccttagaattggaagagacttttgaggttttcttctatagcctctcatccaaaccaaagtctattcaagtaagacccttgataggtggtgattcaatgctgtctttgttcttcgatttgagttaaacatctctctgctcaattctcctgtcttgtgcatctctttttcatgagacagtccttcaggtgtttgaagaccccgttcttcctgagccttcagttctccaggctaaacatcacctgctccctgtaacagaaacagtgcaagaggtaatgtttattgacagcttcccatatgccaggcactatgctaaacatgtaacacgcctgatcttattggatccttacaacaattctgtcagataggtatggttttcagatgaggaactgaggcttatctaaggttacatggaaagtaagtgggcatgtgatattcaaacctatgtgtctgatggactcaaaagtccatgctttcaaccattgctttttactgccttttagatggtatgttttcaaattatttctgtatggtttcctttctctaaacacagtcctgctgttagtttaaccccattctaagttaaaataatttttccttgctattctaaaagactgcctttgagcargaaaattaagccttttaatgcagaagacttcagctctgtaagcctcatactctccgtatatcgctggctagaatggcagatgggctggccagcacacccatggtgggcagtggcctcagtacaaggatggagtctgactgccygtgaccccatgtatcttccctgctgccggaatgatcacatggcttccagaaacgttgtgttcctttagcagcattgatgggagcttcctattgttccagatgttttctgaggaggatactggataagagtttgtattattacagatggtcagagcagtttatgtatcaggaagttttccatggaaggaagaatatatccaaaattctattttgaagctgatggcaggatgtggtgaacttatttggatgttaggraaacaccgtaaacaccaaaataaatacttgtggtttgcgcttactcctttcccaaactaaaataggacctgtgacagcatttcctgaacacatgagatcaagctctagatcaaatgatgagttgataaaatgaacatatttatattaagcttttcatttgcttctcgtttccatgtctagaatctagagtctagaatggttgratggatgtattaggaccagggtgtgtatgatattatttatgtccgaagaacaaactactcattttcacctctgtggggagagactggagttctaaccatgtctcctgtaccttggcagaggaagagtattgggttctttcagccacttttttgggggtrgacttggtcggcagcccgacttatccatccttgtcccagtttcagagcctcccagtggcgctgctgagttttctcccatcactacagagtccgcctccttcctctgttaacccttgcgattcctttccgaggctcctttaacctaaacttaatgtatttgactctacctttactttgaaaacacttttgatcttttttagagttcctctaagttttcctattagataaaaacagctttttataccttttgtttccatggtaatgaattccaggactgctttagaaaaccactagctttgtgtgccagtggaaagttgcagcattatgtactaatacaataaacatcagcccacccgtaggaggcgtgcaagccggtagaaacactgtagcaccacagtcatgaaatgatgtgagcatattattttttactgsaaaaagcagaatttggaacatgagccctgcattgcaggcaaatggtttgggagctctagcatgaattctagtgttcactaatcagctcaagrcagaaagagccaaattaacttgaggcgttaattttcaaatttaacgttatattgaaaccatggaaccccatttccaatttttttgcaaccttcctgagtttttacaagtgccagttctgctcttaggaagtcctaggtgggagaggcttccttgggcaatttactttttggtgtaaggaagattgtttccaaaaaattcagggaaatcttcctggttttgtctgcaaatatacctcttaagaatctcaggtacagatcagaactcaacagaaaaatctattagagttggctaaagacagggcaaacataaaaagtagatttcctgggaaaaaatcgaaatatttttataaaaggctataggtttttgaatacgtgcaaggagaaggaataattggaatctgttttttgtcaaccctgactctgccctctacagccttctctttgttatatcatgggctgggggagtgasaagcaagagaaaaggcagaaagaacatgagaggttggaaagaaaggttagaggtgtgtgctaagttgattgtgctaatttgaaaagagacaatgaatcaaagctccttttttcctattgtagattttaatatttaaagttaccagtgccactactgattatattaagatgcttttatgttgatctgattaaaattacatttgaaataatgaatgacatgtaatgtacaaatacccttatatttggaataatgaatgaygtgtacaaataccttcscagatatatgtattttttaaagtgtaaacattatcaacaagtgtaatgaaagtttttagaagcattcttctaggaggtacaaagttaagggtctagaaacacagcagcacacggtttactacaagactgtggggctatcttcttgcctggaaggattcaggactcctgtccctaataaaattaaagggaggttctctggaacttagtatctgttttgtcttagtatttctaagtcagaaaatgcctattataaaatatctatataatatatagtatatatattataaatatataatctatctattataaaatagatattatatctatctataggtagagtttaccaacgctgactgatttgtacccagctcatttaagcgtttggggcactgctccaaattgttgcgtttctttcttccccctgacctagctgcatcagatcattctcaaagacaccttagttccatttttttttttttccagcagataggttgcacacaaagcatagcttttggctttttgtaaacagagtgcaaatgtactgttctcccccaggagggaaactccaccatgctgamggtgagctgagaccctgagccttgacaaggagccactttgggtgtgctggcaggtcagcctgcgggctttgagaagagccttccataagcaccagggcacacattcaccaatgcaargcaaagctctgtggaaaagcctggtgggttcatccctgtcccaccctagatgtacccccagaacagcagaaatgactgtgctccccaccttgtgaaaagggtctagttttaaagtgaccctggcagaaggaggggcagatgcctccattcctcctcttcagtttctccttggaccttttcctgctgttctgtgggttctttgagcattttatagaatccaattttgatttatctatattgctttagagtgtatcttttgacatggctttttaaacatgtagacatacatgatttatcattgcctactattattgtcattttattaggtccagcgaagtatagaaacctagacatgggccaggcacaggggctcacacctgcaatcccagcactttaggaggccaaggcrggcagattgcttgagttcaggaattcagaccagcctaggcaacatggcaagaccttgttgctacaaaaaagtaaaagaaaaagaaaattacctccctttacccttccaattatatgattgtcttatttcttttgcataccttgagaactgcattagacagtgttatgattttttaatcatcaactgaatctagaaaactcaagaggagaagcaaagcaaactcgattgtatttatmtatatttttgccatgtttttttcttccttcctgatgttctgagacattctttcttttatcttttcctttttgtttagagaacttcctttartcattattttagggcaggtctcctggtgacaaatcctcttagtttttcttcatctgagaatgtcatccctgaagaatattttctctggatatagaattttggattgatagttctttctttcagcacttaaaaaatgttgcactgcttcctactggcctccttggtttattttgcgaaatcctctgtcattcaaattgttcttcccctatggcttcatgcatcatttctctctggctactgtcaaggctttttcctttgtctttttgtgggactgtgatgcatcttggtgtgkatttctttgggtttatcccatttggtgctcagattcttgattctgtcttttgccaactttggaaagtttttagccattatttcttcaaatgcttttctagccctaccctctttttcctctccttctgggagtcagatgacctacctttaacatcttttttttgtagttcaacacgtctctgaggcttagttcatttttttccccagcctaatttattttgattgtttatgggtaattgttttatctgtaagttcacagattttttttggcctctgttctctttattctgctattgaacccatccattgagtttttttttttttttttacatttcatttataatatatttcagtcccaaagtttctacttggttcttctatcttctgtttctttgctgatacttctcattactttgctagttctttgtagttttttgtttcaagaacatttatagttgctctttgaaacccatatccatctggctgccaggaggaggagtcctgttatggttctccatgtgacctccactcccacggttggaatggcttcattactgctgagtggtggcgggtaagacctgattctccaccagcctcctctgacacctttgcagccacattgccacctagcagagatgaaaggccagcctccacactcagcctctcagaaactatcctggtggaggtgttggggctcctcactactgtctaggttccccactaggtctttgcttgtatgggtgggtccacagttttgtgtgtgtgtgtgtgtgtgtgtgtgtgtgtgtgtgtgtgtgygcgtgtgtgtgtgtggtgtgtttcgagtagagtggttattatctaaaagttttcatttttttcttcaatctaaaagaagctaggctgcccctttcctggttctttggacaaagagaggagctttttttgcttatttgtttttggtctatgtgtattggtgtttccaggttgctggcttttcargtatagatgaggaaatacatgagggaaaaagaaaattcaggaactcgttgccatgtcattccctgggtcctgaggtccttaacccacttggcagctccccacctttcggtgtcttcttatgcttgttttagatctaatgctcagtttttagctagacttatgggagaaacagggaagagaacatttactctgccttcctgtcaaagcccctcttgatccttacatttgtctacaccagatgctcttcttcttgttcctctctcaaggtcagagaacagggtgtacttttgagaacgtccattaattcttgtacgaagcttagcttggaacaggaactgctgcagggtagaaccagtctcaagcactggagaacaggaggtagaggtggtgaagtggcccagtcacttgctttgtgggtagacagacctgggttcaaatcctgtttctaccatgtatttgttgcttaaccttgatcaagttatttaacttctctgaccagtattgtccccacctgttgcaaggattagaagggacatatttctggtgcctggaacatattgggcactatacatgaatagccattattgttacaaagcaggttataagttctccggatattttgtcaataatctgatctctgctgtgaaagaaaccagtgcaaactcattttctaggatgctgttttatgtaaacaagtcatagttaaataattactccagagtgacaaacctttttaattttgtatccagataagaacrtcagttagaacatgtagcaagaacagtgattcctctgagaaagtagggtagagtatcttcaaaagcaatgggtggcttgttggtgatttatgttttgagacagggtattaccctgtcacccaggctggagtgcagtaacgtgatctcagctccccacagtctccgcctcccggttccaagggattctcatgcctcagcctcctgaatagttggggccataggtatgtgccaccacgcccagctactttttatatattttttgcaaagatgggattttrccacattggccaggctggccttgaactcctggcctcaagtgatccacctgccttggcctcccaaagtgctgggattactggcatgagccactgcatgttggtgatgttaatgctgtaatgaaaaccctcattctctgtttaagagatttcaccatttaagaagcaaattaagggacactgtgggggcatttctctgctccctaaggagcaccgaagactaaatattttagggagtgttatgctgctgatgacctcagcttgatgattcactgacttcagagtttctttcagatcctaactacaagtcaggtgagagcttgagagggcaggagggagggacttggtgcttctctcaggaggaagagtggacttctaggctggaagggacaagggatattcctgactgagggactggattgaatgttgatgggctctggataaagattgtcatggaggccatttgagcactgtggggcctggaccagtatacttgcttggaatgctcagagagaaccccagtgtcaggttagattccctagaagcagagctgaatataagagaatcttagcaaaatgagttattaacgagcattctcaggagaaaggatgcactttcaggtgaggsccattctgagcctgatcctgtggatgctctgaagcatcaatcatagcagggtgtgttcttccttgaggcaggaaagtaggaattttgtatctttgcatcaaccagtcttgagctacgggcaacctggtcctaagtgataattcccgggcatacttgggcaaggtggctatatcacccaagagtggttctctcgagaagattagaggtgtgaggttagcagtagcactggtgacaggtggaaaaggaatactgggcagggctcaacggggtctayagccccaggcttcatcggtggtaccatgtgaaaaccactggcctgggtaacaggaggcttggcttgtactccttaattttctttatgaccttgagcaagtcattcagcctctctgccttacatgtaaatgacaagattggcataggtagacttttaaggcctgtttgactcaggtgagttgattgagaacacttgatttagtaagagcagggcttcctggcctatggttggacaataggaaccttcaagaagagcaaaacagggaagtatgaagttactgctgcatggctagtggcccaggcaggtgactttggggacttggaagtgaagaggcttccttaccttgggggctagggaccagaattatacctgcatgggccaagggtggaagggctgcatggcttggtgaccaaggggacaagaaggaagaccatgtgaaggactgagcctagaaagcagattctgggaggagccaagcttgcctcagtggttacaatgggatttactctggtaagaagtttgactaaatatgttcagcggctggggcacagtggctgacacctgtaatcccagctacttgggaggccaagatagggggagtacttgagcccaggagtttgagaccagcctgggcaacataytgagacattgtttctacaatttttttttttwwaaattagctggacatggtggcatgcacctatagtcccagctacttgggagactgagatgggaggatcatttgggcctgggaggtagaggctatagtgagccatgattgcaccactgcactccagcttgggcaacagagtaagaccctgtctcaaaataaataaataaaacattaaaagaatgtgttcagcatctgaacttcagctttttgtattctgtcaacattttttcttgattttcattccattcttcattagatggaaggcttattaaagatcctttttttgtaatttggtaatgttattagtaatattttaagataattccttgacttgatagttcttttactgcagcttttgccctggtcagtggaggaggcatatgatattgtattttcatatatgtccatgtgctggaactggacagctctgggggctagtgagaaaagataaagttgggaagaccttagcgatgtcagtcctggagctgttcgaagttagtggagctcctccctctactgcagacagtttccttctctaggatagggtttctgatgagaatatttcattgttctctaacacaagtagtcaatgttttgctcagtttctcttgctgaaataatggtatagattcagtaggttggggcggtaggaagattccagtttggtgcagcaaaaggaaagtcttaccaaggagtgaggtgcttgtttgctggctcctgcaaagttcaggtattgctgagtgggtagatcttttaagaggaggagtctgtttgctcccaggtcagcagatccgtggtggtctgctggggcttgtgcccctcagatgccttgtctcccctgggtggagcttttggggtgggtatagtggttcatgggtrcatcgctgaatttgcataaggctagcatggcaatggactctcaaaatatctgtggtcataaataggaacttacttaaaattttaggcctgggcaggaacatcacttgaggccaggagtttgagaacagtctgggcagcattgtgagacccccacctctacaaaaaaataattagctgggtttggtggtgcattcctgtagttcagttgatcaggaggttgaggtgggaggaccactggaacaggatttcgaatctacagtgagctaggatcatgccactgtactccagcctggatgacagagtgagaccctgtctcaaaaataaaagaataaaatattatgcattactctaaaactagttttatttacaacgaaaaagtaattttaagtacctccttagaagatttagtaaaaatatgacctatggaataatttctgtcatgaaagacaaaagttctttactatatttctatcttgaggtaactattgctgtatttcagtcttgaggtaacagctgacattctcaggatgtggcttccttccttggctgagatgtcacctggacagatacagatatcaccatttgctactaatgatgattgatgttgtaaaaaaaaaagttcttctatgtcaagagggcacttggaaagcaggccataaagagcagttctcaccatcggaaagcatttgttatcactcatgcttttatgtggcaaacacattgcagttcttggcataatgagaggcaggtttcaggagttactgctscaaccaactcttacctgccaaactataaagacaaactattttgaggattaaaggatgggatccctttgtgctttgtggaagcagagctgaaaggttcataatgacagacagaaccattaggaggcatgaaagaaaaagaagcagcaaggctgaaagtgttgtgtgctagaaaggagttgatgccctttgaacattcaagttcaaataatgtgccatactttatctccaaagacaacactactgacccactgtcagtagaccatgggctgtgggttgctttccagcagagaggatggattttcttcagttcygtctactcatgcttgacagagatttcctttgggacaagtaccacgccccaaggagcccaagcctggagaaagggaggctggatcatcatggctgacgctcactatgcaccaggttcccttctcagcattttactcagttgtccttcacaaccaagcaccctatgaagtagcaatgcttattatcctcaccttacattgaggaaactgaggctgaaggaggcaaaataacttgcccaaggccacacagctagtaaatggtacagctgggatttgaactcatcaagtccgatgctagagctgaatgaggctcttaagcattgtaccctgctgtagtgtagttagcagttggaaacatggatgctggagtccaaagaacatggattcaaatcctcattccccagctggttgctatgtgaacctgggcaagtgattcaacactgttggggcaagaaaggaagtcagaagcctgggacaaatcacgacacataagaagcactcaatgcatgctggccactgttagtgttttggttattgttttgtttttatcctggaacagagcgaagctaagaggtrgtggttctctccttgagggtgaataagaaagaattaactgggcattaccaatgttgacaatgtggatttctgggccccactcatgagagatgctaattcagtggctctggggggttggatggtaaatggttggacccagtcacctgcattctaaagaagggctttcagtgatatggagcggtggacttcagactggccagaggcrgcatgtgcaaggctttggaatttaccaaaattcagagcttaattttataattgatttgtttagctataactgagtgacagagtggaacactgatattctgtagactatctcttaatcattaaaaaacaaaaaccagcacaaaagaaatcaccaaaaggaatcaatatgttttacagttccagtactggccaattcagaatgtgtgctggagcaaacacgggagtatctaacagacctgcagagatggaagggatatgagagacctacgagccacatcctggttttatagctgctgaaggtgggggccyccaggggtagaatgactctcttagaaaccatatgattagttaatgggaaagtctgaaacaggactttgatatttggccacctggacatctctggacaagaggccaaaactggaaccctttgggaagttctgattccctgaattcagggtgatagcatgaagtaaggaggaatctcacagctgcttgttgctgcatgtgctttttctgtctggatgcttttttccaccatgcctgccagtaacttccagcttttctttagggtctttggtaagctgccttttcaaggacagtttccctgcctgtgtccttcacttgctcccaacagagttcattatgtcccctttcatcactcctgaacctaacggcattttttgcacttagttgatgttttttgttactgtcacctttcctctgatgcacttagrtagtacaagtagagccaccctcctattttgcatgcttgcagacatcactgaccatttatccatttatgtattcatccatatgtatrccrcagagcacccattacatatgccaggtacatttagagaatatagagaaaagtaaagaataaatgagaaaatatacaaataacttgataatttaagatactgatatggactgtgaagaaaatttaaaaagggtgatgtgacagataaatgatatggtgggagagatcctttttacagggtctttagggaagggccctctcaaagtgtgtctcatttaagctgagactcatgatgagaagtgggacccatgtaaagaactaagaatattctaggtgggaggaagaatatgtgcaaaagagctaaagtgagaatgaactaggcmcctttgaagagcagaaggaagctagtatggatagaatggagtgaacaagaggaagactgggagacaggcagggccacatctgggaggacctccttgtaggccacagagtttggattacaacctgggagtaatgggaagctattagaggtgcttcaacagggaaatggcatagtggggtttgtattttaacagatgactcactagtttagacttgtcctcagcttcttctttttttttttttktttttttttttttttttgagacggagtctcgctctgtcgcccaggctggagtgcagtggcgcgatcttggctcactgcaacctccgcctgctgggttcaagaaattctcctgcctcagcttcccaagtagctgggattacaggtgcatgccaccatgcccggctaattttttgtatttttcgtagagacagggtttcactgtgctggctggaatggtctgaatctcctgacctcgtgatcctcccgcctcggcctcccaaagtgctgagattacaggcgtgagccaccatgcctggcctcagattcttaatacaatgctccaggcaatctctacttattgatcaatttgcacttaaggcragaaaatttttaggcattctagctaaactctttgagggccaagttcctgttttaatcacttttgtttgcctagcactttgtaccttgcaaagagcagattcttggtgaatatttattgtatgaatgaatggtttctgcattatttgatcctttggcataacaaagtggcaargctctctctgctaggtgactttttagcaagtccactgaatagtaggtggtagcatattgtgaaaatggattgattgacacctcacctcacctctgctcatgttaaacattttttttagttctagaaaattcagttgtaattaagctgggaggtaacagagtaggacctctccaaagccctgaaatgactgcctcgctagcttttaagcatcagatagagaaggcctgttgaacttctgcttctagtattatgaagaatagatatttggagaaactctcccaattacagacactgagaaatgctgaatgtaatataaaaaacaaycttttaaatatgtagctaagctcacaaaaattgaatgtaagtctctacagaggcaaaaatggagagagagctgacaccagggtggtgagtgaggatctaagatatgggctgccttgggagtgtgtgcagataacagaaactgaaagcttcagttttaattgccatacaacagggatgagtagggaggggtgcattgtggaatgggagatgaggacttgggcgctgttacaaggtcaacggaactgattaagagtctgcaaaagccaggaatcttgaagatctacaccctcagtgaaaagatggactagaaaaatccatttggcaaagaaaaactgctatgagaaattgttctggccttggctgggggtggggaaatgtctctgctgagaattctgaactcatgaaggtttagggcttaaactcacattatccacatatgccgtccaggaaacctcaagcaaaagaattgttaagataattccagtttgagagagactcaggattccagcagaatcggaagagaatcagctttgtaggaatgttcccacagctggggctctttagaattctcacagattaaaatcaaccacatatgacttcacaatgaaaagtttccagttacacagagtaaacaagccatcagtggaaacaacaaacagtagaattagacttcccaagaacttgaatttaagaattatcagtcagaatataaatgaaatgtcctaaaatgtttctagaaataaaagatggatttgaaaacatgagcaaaatgctattaaaaatgtctaggcagaatttgaaaaggaaacaaaatgaaatttttgaaataattatattcaaaactgacaactcaaaaaggaaaaaaaaggttttaacatctgatatggtttgactctgtgtccctgcccaaatctcatctcgaattgtaattccccacctgtcaggggagggacctggtaggaggtaattggatcatgggggcagattttccccatgctgttctgtgatagtgagatctcatgagatctgatgtttaaaagtgcggcacttccttcaacacgctccttctcctgccgccatgtaagacgtgacwtgcttctctttcgccttctgccatgattgtaagtttcctcaggcctccccagccacttggaactgtgagtcaattaaacctcttttctttataaattaccctctctcaggtcgttctttatagcagtgtgaaaacagactaatacaacatccaaatatttttctgaaaatcactgattagagtttgagtttgttatactgttaaattatatacaaagtttaaaaatcataaggatataccatgatgaatttccataaattaatgtactatgtaaccagtattcagatcaaggaacagaacattaccagcatctcataaaccccctttctgttcccttcatgtaatcttttactccaaggtcaactagtattactccaaggtcaaccagtatccaaaaataggggtgtgactattatgcaagtatcctgaattcttataccattttaattttgcctattaaaaagattttattcatggatttatatactatataatcttttgtatatgacctttgtctctcaacatatgaaaaaggataaaagaacttcatatttttccatatagttatacttttcttatttaatttagtattctattgtgtgaatatgccacattctacagctgttgggcatttgggtaattttcagttttgggctatcgttttttcctgttgggtttattcctaggagtagaattgctggtgacagagtatgcatgtattcagcattagtagaaattgcctaatggtttccaatatttttctaaaccagatgaaatcttgtctggaagttcagtaaacaaaaccatattcaaaacatcaaaacaaagtaaacataaaacctaatgtaatggatggatggattaacaacagattagacctagtgaagaaagaatcagtgatttggaagataaatatgagatattacccagaatgcagcacaggaaaaacaaaaggatagaaaaggagattaagagataaaggataaaattagaagacccaatttatgtgtaattgaagagagctcagtagaatggagtcagggaaagagagcctaaaattagccaactcaatattatccaataatgtgagctacacacataatttaaaattttctagtgtataatatgtatgtttttatttaacctgatatatgcaaaatatttcagcaggctggtatgaaaattattgaggtattttacatatgtcatactaagtcttcaaaatctagtatataattttgtacttacagcacatctcagtagtttaggctagccacatgtcaagtgctcagaagccacatatggctagtggctaccataatagtgcacatttaaggtgcactatctaaggtgacatctaaggtgtataagggaaggtaaattgagtgaagttccaggcattcggagaagtgagccagttgaagtaagaggactgtgtcatgacagtgggaggaatgtggataagtgtrtcaccgtagagacagcactgggctttgggtttacacacattcatatccctcggtacaattattatacccttcaacatccagtgagttgcagaattacagctgttgagtagttcagaacaataccaaacaatagcttagtacaagaagagaaatctatctgttgaatttacagaggagattcaggacctcagaatttaattggcctcatgcaaatttgaccagaagcctaaagtgaacatgtgtgacatttacgtcaaagatcactgtgtgtattaatagaagcaggctggttggaagtggttttcctttctttggctataaggatatgaaaacttaacaatgaatacaagtagattgttactttggtttttatgtctcagttaaaaaataacaccatgtcggccgggcgcggtggctcacgcctgtaatcccagcactttgggaggccgaggcgggcggatcacgaggtcaggagatcgagaccatcccggctaaaayggtgaaaccccgtctctactaaaaatacaaaaaattagccggacgtagtggcgggcgcctgtagtcccagctacttgggaggctgaggcaggagaatggcgtgaacccgggaggcggagcttgcagtgagccgagatcccgccactgcactccagcctgggcgacagagcgagactccgtctcaaaaaaaaaaaaaaaaaaaaataacaccatgtcctagtgtgctcatatagcacaaaagctgtattatcaggctgtagatcaaataccgtatgaacttgacccaaataacctcagacttcctgcgaaattctatgtctgtcttagatacgtgactgtagtcagttgattcattttctttgacagctcaaaaacagcgaagcagggcasttggaatctctgtctagcctcagctgtttgaaaaatagtaatagaattgaaaatatatttctgtccttaaaaacacctctaaagtgctgtatttgtgtaatgataacactttttatgctggstctgccggtccaaaaataggggtgtgactattatgtaagggagatcattatgtaargttgtgacctttataatggaacaattcttattcccatactctaagcatgaaactcagccaaataaatgctgccattatgtttgattatggggtaatagtgaaattattagtttaatccaattatcccaaatactgaagtatagggttgtgttagtctgttcccgttgctataacaaaacaccttagaccgagtaatttgtaaatgatagaaaattatttctcagtttttgagattggtaagtccaggatcaaggtgccaacagatttggtgtgtggtaaagacttgccctctgctccacagatggtgtctggttgctgcatcttcacagggtggaaggagccaaagcgggggtaaacttgttccctcaacccatttaaaagggcagtaatcccagccatgaaggtggggcctcccagagtcctcacctcttaataacatcaccctggggrttaagttctgtgatggttaatactgagtgtcaacttgattgaaggatgtaaagtattgttccttggtgtatctgtgagggtgttgccaaaggagattaacatttgagtcagtggactgggagaggcagacccaccctccatctgtgtgggcataatctaatcagctgccagcacagctagaataaagcaggcagaagaatgcggaatgactagactggctgagtgttcccgccttcatctttctcccatgctggatgcttcctgccctcaaacatcagactccaacttcttcagcttttggactcttggacttaccctagtggtttgccaggggctctcaggcttttgaccacatactgaaggctgcactgtcagcttccctacttttgaggttttgggactcagactcgcttccttgctcctcaacttgcaaatggcctgttgtaggacctcgccttgtggttgaatgagtcaatactccttaataaacctcccttcatatatacatctatcctattagtcctgtccctccagagaaccctaatacaagttccaatatatgcattctggagggacatgaagattcaggccatgacaagtgttctagaaggttctaccatactaactctgagatgttctttgtattggctttcagaagtttacaaaacagtctgtctaatgtacctatgtggtacctatagtaacttggtacctatgtggtacctatagtaccttggtacctatatggtactaaattgatcttcttataaaatatgggaaagcatgtcggtcagatgttgaatcttttatttgtgcttattttctatgaaaccaaagggacagtgccagtgttcccctggtgtcttggggctgagtactggtggtggtgaagaccatccagtggaaagagtgttaggctagaagctggagggtctggttgtgtgactagggaaagtcactggtcactttctgtttgggtgctttttccacagaaaaaatttatcatgtatgctaggattggaagacatcttagagattatttattctcacctmacacctaaattattagaactctttwaagcatctgcaacaaataattatccagttttgacttgaayggrccagaggctactcccttacaacaccactgctccattgtttggtgtttcacaggcgtggaacattyttctttgtactgagccaaamcctttttagccaatgcccagctcataaggggcttgggaagtaaaacattattaaatgttaatttaaaaaaacactatgcaaatctgtatcactgtttactggtgtggtgtggacctaatgaatggatctagtctgaattgtaatgcctaaattcttactttcttttcagcaacaacccaaactgaaaaaactaacatctttgtgatgtggcctcataatccaggcattgagctactgtgggtttgtcttgataggagggaaaagaattctgcctatctaggttaactaggaatgctcacattttttaaagctggttttcaggcttatctttagagtttaacattccaactcttaacagggttaggaattctcccacttctacttaacagcttgctccccaggacacgagagcctcctaggtttctctagtatggggtagtgggtgaattatatgttgtggggatgctgcaggtccagaagctctcattgagccatggggtcgggggtaggggttgtctgatttgttgctttgttttataggatattcattcatttttaattcactygctagtatttgctgagagttcatgtgtttagcacagctttgtctcaggaagccctaaatatcctcttcaacatgatgtgttatcaccagaggaacttcagtgaagatggagctacatcaggctagctggggagggccagaggactgaacctggatctctgggatttccccttgggtgcattacaatccccaaaggaccctgccccttttccycgccagtcttagtccctacatttgaggaggatgctgggatccccctggttcactccactcctgccaccctggaaactctgactctagctctgaaggtgtggaatttagactggagcagtgagggcggtggcaagtcatggagctggagaccaggtaggggctgctggattctcagggtttctggaatgaatgtccttctgtcactttcatgttcctctttcactgaacagtcaacagctgagatcttggctgggtttcatactggacagtgtattmttgactttacaaaaggtggtggggtgttaatgaggttccttcctgatttcgtacttgagtaatttctttccagccactgctgtgtatccctgctccttatccagtgcagtttccagatggatttacttcctagcaatttcggagtgcaaactaaaggtgtagtgtcttgttctaggtgctaaatcttgttgaggtagagagaagggagaaacctgaactatatttaaacaaacacagtaagtccctcarctcatgattggctggcccttggttcttgcagccgtgcagcagcaccaagcagaacttcattttacctatttatatccccgatgttgaaacaaacacacactattagacattccagagtaaagctcctgtgggaaatggaactgggaactatgtatccccaaggaaaagccagacattcaaggcaaaagctcaacaggaaaacaaatttgggctgcttataaactggaaaactcaatgctgctctgtaatgatatgactgaaaacaagtgactgctacaattacaggcagcatgtggtggaggagagactggtaatgctagatcacatcaastgtaccgaatcaagtggttagaggactgaagaaagtggcagatctgcgagagttgagatgaacaagcaaggtgatcattgtaaaagctttctaatgacatgtatggtctgcctcccaagaggatcctgacttccttgagggaagaggcatggcagagaccggctctagagtcccagggtttggtataaactttggtttcctactcattagccaagttactcaacacgttgctatgtcagtttcatcayggaaaaatcacaagatctttaaatctgtgaaggagactttatttcttataaagggttatagcctgtggtctggccatttttgaaggctgggaagtgtagcctcttgcagaggctattaacagacactttgagggaggaaggggtggaacagggatttatgctgaggttggccaagtatacatattcaataggttacaggaggagctatgaataatcatgaagtgggagaggtacacgtgtgataagcaaacatgcgtattasctgcatcccatgttcactttggggtggagacttaacatttaagtgtcttacaattaggccttatatggcaaaacgtaaggcagggacacgaaggccctcaagtttacagcctctgtaaaccagccagatcagtccatggtccatggtctcttattaggagaaagttactgaaccacagctgtctcttttccaatmaaaaaatgtggktatggcttgtggaatcggccgggggtcagcatctggtggtgagagtgctgcagttgtttcaatagtgcttatcttgaggccggtgctggtttaactgctagagaaaaagaaaaacttgtggcagttggaacagaatttactctttaagtgtggagggtgcatgacttaacccttgcctggcatggccttaggcaatctttataatttggtatcttattgccacagagtccattttgttagtcttaggatctctatgttaacattgatgctggtcagttgttgcgtctaaaccacaaaaaggaggggatgtaatgagacgggtctggcttcccatcgcaccgtggccaggaactcagtttctaaggtttctctggggtccccttaaccaagaggggatttgttcagccagttgggggtttaggattttagttttagttctcatcatctatggaatagtcattgtaataacaccttcctagcaggattatgatggggattgtcaatggcagatgacgtgcttattgtggtggctggtactccttatgtgttcagtatcattgttatctatgtttctgtcgttcacattggtacttggctcattgccaacattcagtaagcatttgtcgaataagtaaatgagcatttatgattagtgttttaataaaaatttcatcttcacttaattacttccctcccttgctggttaatattatttgatgaatkaccgagacacatagaaaacttgggaatragggtcctgaaaataagggttctgatggttcaaatgcatagatagtaaatacaaatattttctcttaagaacataatcagcaatttaataaaaataaaaaattgctctccatgtgcttcatcattttgcaaatataaattagtgtgcagttaaccatatatctccccaagtctgctcttcctcctgtgtttaataaaaagtggctgcatcctctcaaatatctaagccagaaacctggggaatcattgctgggtcttatttttccttcattcctcacacgcattcatgtttgtggtcayacaagccatgtcccatttcatctcctgrttagcttctgaacctgccttgtgtgtctgtctctgctattactgccttagaccagctgctgtcaactcttgtctgcattaatgacatagtgctctggctgataattaaggaaaagtcttctaggaatgtccgaggtaaccagtggttgaatttcctgctgacaatctctttagtgtttttgcacagaggatttatgaaggatttaagcagcttggattactgtgagtctgcagaacactggaggtgcttgcttcttccctgggtgaattacagatgagaagattgctgtggaagcctattggacatgcatttgacatgcatgtgcctgggagttttctgaagttttgtgttacggaggcacactaattctgaggaagtaaaacttctcatgagaacaggagatgtagctgtggaaaagtccaacacagatgagaaaaccattttcatatatatcagaaaaatgttacttattttatcaaagtttatttagcaaagcccacacatatcttgaggctaacctactcagggcagttgatagccagggaatgccatacaggagtatggaatcaatccttcagaattcagaggctaaacatttccatattgattaggaaaacccaggttaaatggattaatatactccggctgttctgagagaggtcttcaccgcatttgggcaagcttattgataggcttaccagaatggttagggaatccagcctggcaaggaatckcaaagcacattgctggactggtgtgactgtacctcacccacaagagctgatcatcctctctgtaggtagaggttgaggaagagcctgggatgcacagcatttgggtggagaaatacattcattaggaaataaaattgaatagttcaaagactggttctggtgctggtgtccttgatgctggtagctcagttctcccatctatacctggcagggcttcctaacggagtccaaggtggactgtggctctttgagcatcaggttagtcatccctatggggatgtggttgtaagagataatggtcatatacatttctgcttctggtgaaaaaagaggaacctattttgtggataggtgcctggagagagatgagggaaagagatgagaatacaagggaatacatggagcctgggtgaagagaaaggtgaaggtcagaaggggaaaaagtcgtgtttgtgaaagaccatgtgaaagtttgggcacaaacagaaccatagggccgaggtaaccaactgtaatattagcargtgggggagcctccagctttctctctctaccctgccatagaccccaggtgaggtttcttaccctggacccttccagtggcctctgcagagcrgtagagagtggcgaacagtggtggagatgctgactcttatgtcagtgacctggtggtagccctgtagatgtggcagtgtgtcaggtctcttacctgccccacaaggagacaactagcaagaaggccaaagtggaggaaaatgagtggttggttttgtgcatattacaggacatctgatagtgccctcaaattggctggggaaggcttcaaagaaagccygagtcttggtaattcaggcattaatgtaaatgtgactacatttgttttcgtatgttggtggctcctcccatctcaccgccttgaatgaaagttctatgaggccagaggttgttttgttcactgttatatgcttggcacttagtagggactccattcatatagattgaatcaatgactccattactaatgctggaaaaaaataacatacarggccagctgtagcagtggcgcgtctgttctcactgaaaaagaaactaaggcaagagtaccacrtaaaatagaattggctggattttcttgtctcatacaatcaggatcagcacagttttgtctttccgcaaaccaacaaatggaaaaggcraaggctattgaaacgagtgggtactgcctgtgtgaccgctgtcagcgtcatcctctagctcctgtaactgtggttcttgaggctcccacagcgaaggggaatggaaatgaagccatttgtacataagctacatttggtgaagagtaacgacttactgattcaggctgtccaggaaggccatgtttcttctccatgccttttcatttcttgtctgggttgcattgaaaacataaattgtactcaaatgtattaatagctttctaatgtgagctctcagtaacaaagaaatgaaaagaattatttgaagcactaaaaaaggccagggtttcaagctggtttattttacytgatatgttataaaaaaaaaaaaatttggacagtaatgtcaaatcggagatgcctcagtatggttttctcaatagaactgaataatatattagtgagtgcatctaactagcaaatgggatcaggagcatcatggaaataaagacagaaaagtgccttaacagctttaaaattcacagatggcaaatcaagtaaaagatctgtttmtcaccctctgaacactctgtaaagtgaacattggagggttaggaagtttctaatggcaactgctgtgctttgggaaatcttggtggaacccttggctctctgacatttagctgctgcagaacggggaagctgctttcctgaccacattgctttggtacagtaaagttgagaatctgttgtcctttgctgggagtatccgaaggcaaaagttagatatgtataataatgcactggagattgttaagccgtgtgctgtgtttcataaagtcttgtacaaacagcttgataaagaacattacagaatattaaaagctgctttctagtgtttagcctctttgtgtctacaattcagtgaatgttgtgtacattaactgcatggcttgagtcctgctatttttatgccatgaaaatgtaaattaataaactccacagttagattctataatacattttgactacaactcttaaatttagcatattttataaacatttcaatttgacctgtccttatttgcatgacatacrtttatataactttatgaaaataacatttaagaagttctacaatgcaggcatttattttctagttatggagtttttttttctctttcttctgtctctcccactccctttttcttcctttggtaaaccaatgcatgcaaagttaaacctttcaaaactcacccccaccgcctcaccccccttttttttgaggtttcaacarttggttcttatttttttcaatttattttattttattttattttattttgagatggagtcttgctgtgtcgcccagactggagtacagtggcacaatcttggatcactgcaacctccacttccctggttcaagcgattctcctggctcagcctcccaagtagctgggattacagggtcgtaccaccatccctggctaatttttgtatttttagtgtagacagggtttcaccatgttggccaggtgagtctcaaactcttcacctcaggtgattcacccgccttggcctcccaaggtgctgggattacaggcctgagccactacgcctggcctcaacttttagattcagggggtgtatgtgcaagcttgttacaagagtatattgtgtgatgctgagttttgagtgtgattgaatctgttatccaggtagtgagcatagcagccaataggtagtttttcagccctatgcctgcaccccttataacccccagtctctgtttccatttttacatccatgtgtaccccatcaaaaccccaaatttaatcacttggtttcctaacgatttgctatgtaatatgaaaatgtaaacatgtacttgataatatttacctatccataaatggttgtttcatttataacatkatctctattagatatccagtattaatatggattcaaccatgttctcatgaaacataattcatggtgaaaacttggtatgtagcatttggcctcaaagacaagtcttaggtctgtcttctaattaaatgtgaggaaattgtctacgtagttaggccccaacattctggctttatcaagctaaaaagatgaatgtattcggaagatgaggattcttgatcctacctacttgatcctctgtgaatcacccttaggtcagagggacttcaaaagatgagaatgactaatttttttagaggattaggatgaaaccggcatatttaaagaggtcmacaatcttatataagtgaataaatggatattttccttgtgtggtggcaggctttggaattatgtgaacttgagtccaaattctggctcacccatctagtaggttttgaatgacattaaacttctcagtctcagagcctttaccagtaaaatgaggatcagtaaaaagtaccatgtaggattattgtgacaactaggaatatgtacagtaagtgcttagctgcctggcacccagtaggtattcaatagatggtagctattagcaatatttatttgtaaatacgtagaatgcattaagaatctgaaaagagtctgggtgaggtggctcatgcctgtaatcccagcattttgggaggccgaggcaggcagatcacttgagtccaggagttcgagaccaccctggccaacatggcaaaaccctgtttctactaaaaatacagaaattagccaggtgtggtggcacacgcaggtaatcccagctacttgggaggttgaggcatgagaattgcttgagcctgagaggcagaggtcatagtgagcagagatggcatcactatactgcagcctgggtgacagagtgagacccttttttttttcttttttgacacaatctgaaaagaaagttctgttatcatggtatatttataatataaggtagaactgatggtgttaagtataatcacatacacaagtatatacatrtacattctaaatccaagattgtttctgagacagattcaagaaggaatctttcagcagtgaattttggcttctctgaagatacaactcttkaaaggcagcatcaaartagttcattttctccaatggttcataggtgggtagagtatccttaacaagtatactttacttgctgctttgaaacattacagcatattcaagcccacatttggaacaatggtttttcccacttattctttcttaaggttatgataacttcttttccttcattctcatgatttgggccatccacagaatggtggagtcattttttgacttcaccctattggtactcacagagaagaataaatgaaagtcctagagggttactctagttgaggctattccaaaagtgggtaaatttttgacgattcttaccaccacaattcttcctctattttcaaagttaggaaaattttgcattttattgcaacatgaaggataactacaaaaagcatagtcccctgtatgtgtcatgttaagtggcctagatctctccggttgatcctttaatgagatcactgagtttgtcatgactttcaaccaccaaacatattttagcaaattctaaccatgaacaaagttaaagacttgttaggaagaaggcttaattgagaaggaagaatggaaacatgatggacttagaacacaggtgcatttgagcggcagccccagatctgttacttactagctgtgtgtgaccttgggtaagttatttagtgctattttatgctatactctacttcagaatgggaataatactacttacagtaacctttgagttttttatatagatcaaataagacaactcatgaagcactagtaacagtatctagcacagagtagttatttgataaaaggtaagcttccttcccttctccctcactttatctgtaaaaagagaccagtcaccctgcctacttgtgtgagaatgagtatttgtgcttgtgagtatcaaatgaagcaatatgaaaaaactttgtaaatataaagcacaatatcaacataagcaagraaaatgacagattttatgatcttggatataataaagctgtgcayttgttgagaagttggtgaagattttaaattaatttgactcccttagaaattccttggtaaaggaaaggtgagtagttttgcactccatatgtacagggttaaataatgttccccaaaatttgtgtccacctggaatctgagaatgtgactttattttgaaatagggtctttacatatttaattaaataagttaaggtgagatcataccacattaagatgggccctaatccaatgactcatgtctttataagaagagaaarcacacacacaggggcgaaagccatgtgaagatggaagcagagattggagtgatacatccaggaggcaaggattgccagtgaccaccagacactggaggaggcaaggaagggtcctctctagagcctgcagagaacatgggcctgctgatgccttgatggcagacttccagcctccaggactgtgagataacaaattgctgttgctttaggccacccaagaaggtccttcattatggaagcccatggaaacaaatacacaccatacttctcctgtttttattggttagaagtttgtataatttaaagtgatgtaaagatgttgctttaacttagacaaaaagtatatgaggtcttataactttactgaaatcctgccacaagtggaaattaattctgacattatctacatgtaagagttcccaaaatattggtttttctttgttcttaaaaaaaatctaaagaagctgggatgaactcagagctgggggaaagctttgagtgtccaattagtcaatcccatccctttgctaaacaggtgaacttacatagaccagaaaaggtatgtgtggggatgagcctgaggaaacttggtagatttttataatggaattctccyttttaaaattaaaatcatgttgggtgtcttgattattgccacataactgatctgaaagttttgttttacctcccaaacaattttgggttagtccataccaaagctttatttctcttctctaagaaaaaatatatatgataaatacttctacaagtaacttaaagcactgctggttatttgacatatatccgcaaaaaaagcaaagctgaagagtattctaaaaatcaatagtataataaactgaatagtattttgtctgaagccttttaggtttttccctttagagcatctttctgcttaaaataggcactgccatcatcgtgttcctctagctaatgaaggtcctgtacagttcttggactgggggaaaacgggagaatggtttgtgcttttctgaaaggaggcacaatttgcatcatttttaacaacagtcagtgtggtttcagacaaggctgctgaaaggtgaaatgaaaagaaatcttgtcctcatgtgcccctgttctctcatgatatagcacaaacaatgcagggaactggggtggttgtaatcctgaaggggcaatcagcatccaagccagtggaacctgacttttatcatgtgccatctctgcaaagatttgaaaaggccttgcttcttttgtcacacagatgggcacatctgtaaaagaagggactaactagtcacaatagctgaaaggttctttgtcttttatttgtaaacttgcamtaggaccaactcttcatctgtgacatatgttctcattatttgaaagcaagtttaatttctacttaataagcattcaattggctgtgcattagcaatcgtctttaaacagagttgaaaatccattctaggaaaggtgccagtggcccatgcctgtaacacctgcactttgggaggctgaggcaggaggatcacttgaggtcagcctgggggcaacatagtgagacccctctctcttaaagaaaaaaaaaagccgggtgcggtggctcacgcctgtaatcccagcactttgggaggctgaggcagatggatcacctgaggtcagtagttcaagaccagcctgaccaatatggagaaaccccatctctactaaaaatacaaaattagccaggcatggtggcatatgcatgtaatcccagctactcaggaaggctgaggcaggagaattgcttgaacttgggaggcgaaggttgcagtgagccgagattgcgccattgcactccagcctgggcaacaagggcaaaactctgtctcaaaaaaaaaaaaaaaaaaattaggcacggtggtgcttgcctgtaatctcagctacttgggaagctgaggcaggagggtcactgagccctggagtttgaggttacagtgagctatgatcatatcactgcactccagactctatcctgggtgacagagcaaaaccctgtctctttaaaaaaaaaaaaaattcatttctatgaaaaatagcactggacaatacaagccagaggtcatattctgacttggctaatggacaaacaaaacaacaaaaacccaccacaaaacatctctcaatgaaaggaacaatagcaacagtagctagcatttattgagggcttactatgcacagggtgctttataagaattagcccatttggccttcccagcagctgtacaaggagatgcaccacaattactgtcattttcatttcataggaaactcgctcaggtgagttcagtaacttgactaaggccacagagcagatttgggamtcaaattcagtacatatctgtgttcgtggtgacaaagacttttgtccagtttatgtgcatcttattgtgatctgtgcctagtattcaatagcacagtaaggaaattagtttacaataatgtaatttaaaaatagctaaaagagaaaatttataatgttcccaacacagataaatgaggtgatggatatcccaattaccatgatttgatcattatacattatatacatgtatcaaaatatcacatgtattccccaaatttgtacaattatatcaaaaatacaaaagtatgaatattggttaaacaaatgaactatttgataatcaagaatcaaagacaacctcattaggcctagataaaccaaaaggtccttttttttttgattccacatctagaaagcaaaagacatagagtatgaacatgatttggggtttgcatttcaaatacgttttgctaaagaaacggcactgggtgtacatgtattatcacccagaggaggtaagtttatagagtatgagtgtttcctttgcccactttctgtgccccacatcatttagtagtagatgcctctgagataagaacaatgaagaataatgttctcccttttaccttatgcctaatctatacttggttctccttcagtgtttgttactttgttctcacaaacaaatgggcaatatcaaagaaatccctggtttgtttacctttatattgttcactcctttctctgagggatgttttccctttgctgytccccctttttttttttgacagacatgtttcctttcattgaaagagaygaaagaaactaggattgtttagtcacaacaaaacaaaacaaaatatacatacgaatcaatgaattttgagttgtgaagcacagtaggaaaaaagtattgtttctttggtcacaaccctctccctcttgctaggatgtgcatagagatagtaacttagyaactcctctgagatgaaaagcttcaagtacaaactaaaatgttggccccttccaacttctttgacaaytgtctatctgtgtaggttgtcgagattttgtgaagtatcttcttaaaaagtagtttacacatataaaattaagtaatttttacatgagcatttaaaaagtagattagaagcccttttggaaattagttagaaatcttgagaatttgaaacaaaaccaactacccaagaaaccatcctcaaatccatatgcttaaatgtgctagtgtgatgcaaataatatagaaacaacctagaccaatattagtgaattcagaattacaataaaaatatatagctaatagttagagcgtttgtaccatgtatcaagaactcttcaagatggcctccctgtaatcccagctgcttgagaggctgagatgggatgattgcttgagcccgaagtttgagaccaacaggtttgagaccagcctgggcaacatagtgagacccagtctcaaaacaaaaccacctcttatcatcactttaaatgtattagctcatttagtcttcaccaaaaccatatgatagcactcttattatcatctctatgttacaggatgaggaaactgaggcacagagaagttaagtgacttatccaagatcaaacacttgcaaagtgagagagtccagatttaaactcaggcagccttgctcaaggctctgctttattgcctttaaattatgaataaattaacaggttatttggcaagactagagataattatgagggaagtgtaacaatgtggaagcatgtgcagaataatatgttatctaaaggatacttggctggtaggggcatgtgtggttttttgcttgtttttttttttgtttgtttgtttgtttttgagatggagtcttgctctgttgcccaggctggagtgcagtggtgtgatcttggctcactgcaacctctgcctcctgggttcaagtgattctcccaccttagcctccaagtagctgggactacaggcatgcaaaccacacctggctaatttttatatttttagtagagatgaagtttcaccatgttggccagactggtcttgaactcctgacctcaagtaatctgccctgcctcaacctccccaagtactgggattataggcatgagccactgtgcccagctgggcatgtgttcttgttatataatgactatgtagacagagactgaaaactattatttaataatggtagatattagggtataggaatccccccaaacttgaatgtcacattatttcttcataaataaattaatgaaagcacattaaagtgctcattatctatgtttttattttgccattaatacttgtaggtgatgtcatttcatatatccttcactaagaggttataataatgtagagagagacttaagctttttgtttattttccatccattcatttatttattcaatatttattaaatgctggtagtttacaccaggctgtatttgggtgycggggaagacaaagatgtataaggaaaaacaaatacctacctttaaagataaaaaccaggcattttgcggaagggggtggataggcaagtacacaagtagccccaaaacagtggcaggaatgctgtgaagagagatgctcagggtttggtgggagcagagggaagagcacctcatttttctggataggctcataaaggaggcccagaggaatcacctgagttaagtctggaaggaagagtaggaagtgttcctgggaaaatggtggggaaggcccttctaagttgacaggagagggaggtgaaagtgcataggtccggaggggatagaactggccacattgagtactttaagtaattcaacaggtctgaaatggataattagggttgctgaatctaaaaggcctgacttgacaaggtagaattctgtaaggtatgcrgcttaactagttttgttcattctgagctctaataattattagctaatttttaacttaatgattagttaagattttcccccgtccaggtagtcataacaatatctagactctggaatttttgaagatgacaaaattatttgttttgaatgactgatcccatgttccataaagaaaactacatataaaattaaatggtgtaagcatgtgtaggtatgtttttctctctatatctacattaaaatagtaatagaggataaactaattttaaagaatagatagtacatttaaaatttttaaaaatttatttttaactgacagaatttgtacatatgtatcagatacaatgagtggaatgaaagttgaagcacccattgtgggaaggatggcaaagagaaatgggcaaggaccaagttgctgtgggagtkatctataataagatcactatttgatccctataaatagcccgacaaaactagagaagtcaacatgaaactttattttcacgttttaatattctacttgatatttcacctggaatctggggtgggggaagggggatttagacacctgtttgtaaatcaccatgtgacctggaagtccctggaaaacatgacttgactggtatttattaatccttttgatataaagtctcttaaaatgattttcctatgtaagtgtgactaaggagtaatttaggctgatttctctgatgtcttgccaaaatcagtctcattacttggtattcacattttccatgtcccccatacaatcagtccatcaggaaagctagttaaatgagagttcagatgacttcttacggattaaacattaagggttttgttggaatggggccattttccaagtattatttattttcttaattttaaaaagtatttggtgcttgaacagatatgccctaggatccgcaaggtaccttgtcctttcattattatgcagaaggagcaaattaatctttagggttattaaaggttgaatgggggctttmttcaaamtctattttataagccttggaagtagaatggatatttagaagataacctaatctgacaccctgataataacagtactcataatgataatagctaacatttactctcayctgtgtattagcttatttacgccgcagtcctgcaaacattgttcttattttacagatgaagaaactaaagctaagagagattgatgaagttatccaagatcataaccttggtttgttggactccaactctaaagyccacatttttctatcatcctctactgttttgttgtatactcgaggatgctgaggcagagaaaagctagttattgaaaacataggactagttttgaaagagtgaggggaagctacatctttggactcagtcattggaggagctcagagcctgtgggtcagctggtggtaaatgagggtcttgcttctctctgggtgccctctatcaccagtaggggtggctcatctttgagatagggcctcatgtgtcttgctcatgcttcaagtataattcatgtaatgacagtgattgaatgctgatgcttttgggatcttatgttgtatttttatgtttgtttttgttttctgatgcttggatcaatgatgaaaatgtttcctgaaaacagatactgcagaaagagctctttggatgggctggaatctaagttttagagatgccaaagcttatgaaagcagtttcctaaactgtgagagtatttttttccatctttttctgtcacttgcaagactctgtaacatttgagaaggtgattattaggatatgttccatagctaccgttcttgacccaaagtattaccaattgctcaaaagaagctactacctcactctttaagcctcagaaagactcaaagcctcttgaaatgccatgggagtcttgctgcaaattagagttgatatgagaattaaccgacctcacatttgcttagaagctttgtcctgcggagttgacctacctgctaggggattcattccaataaagaaaagtaggttttgacctaattgggtcatccagcaaataaatgatatgaaaatttcaagcttcaccacagcctgaaacatatgcttgggtcaatggtgtaaactctctcttccattgaccagcactttgattggacattgatggaggttatggcttttacattctcatttatgtttgaaggttgtatgtatgatgatgttgtgttcttttgtcgagaagaaaaatattaaaaataccaacatgtattaaaagcataaaaacaaatttgtgttatgcatttactttgagtaaggctcaatgttagccacttaggagcataactggacattcaaatatggttttatccttagaaaatgtgtaatctattagggaaacagtgaatacttacataagtcttatggtagctatatggacagtagagaaattaaaagtattgtttctctctggagatcgcactgactttggatttggagtactctaagaaattggaccttaaaagatgagtaaaatataggtgtggagaggcttgaaggtgggaaacatgagatacctttaggggaaggggataaataggtcagtctggccagagcagggtcagagtgtgcatacagaaagtgggagtgggtgaaagcagaaggtgtggacttgctgtgttccagcttgatatctcttcgccaacaaggctttgggcagcttcaggcatgattagacattttgttttaataacatgaagaatgtaaggatggcagcccagtccttgtacttgcgtagaacatgaccttcatgttcagtggtaccaggggttcctttgctgtgtacaacgtaaagtgctccctggcttggagtcatatattttttatgtgtctcagacttctttcctttgtgagccctgatgggctccctgagactcgtgataaagcacaaacctatcgggtgagagcagatatgtcataaattaacacacaggagctcagagagctttctttggaatagtctagaatctgagaccacaaattgcagtatctcccagaaacaagattttagagttcatctccctagagaagtaacttcctccactcacacccctgcctgaggaattttaaacaacaatgacaaactgcaaatggactaaaatttaaacgaagctttagtatctgtaacaaactttggttagctattcaaaataatgatgcataatttggtagcataaaacatatgttcttcttttatgcatttgctctgtttacttcctccaagtttttatttgaaaagrtatttcacatatattctgtgccccaggtagaatttcttaatcagaatattgtgtagatctcttcatgttgagtttacttataaggtggcaatacattaataggagtagcagttgttaaacaccattttacaaaaaaggggagaaacgtgtttcatcagtttgctaccacaaattgaaacatacatgcaaaaccaagagttgtaataratatgacataagttaacagagcatggaagatagaaaaatggaaaatggtgtccctaaatcaatttaatgcggtaccagccccaaataaacaacagattgggcctcttcagcaaaacaccctagaaaaacgaagcttgtcagaaattcttcacagtatattcttcatcatattacagcagagattatctgacagaattaagcagaaagtcagttatgagaaatttgtcctcttggtagctaatgttgaaaatattatttatattaacaggcaaaataggctggtagtacacaagcaattttctaaattttatggatgtggttctgcccataaatctgtgtgatgatggcatatctcttatgagactacattacctttcaggttactataattgcactgaatgaagagaatgtccacttgaagattaaggcatcagagtgatagtcactagcagatagacaggaaaaaggtcctggtcttcagcaacaaaagaaactttccaattagctataaatgaatataatttgaacactgaccccttttatattcattatattctctggaactatttcattgctagaaggttaagggattgaaattaaaacactctccttttttatatgataaaaacaatgtaggtagttaaactgtcaaatgcattgaacccagaaatagagactctgacttttgtagagatgaaatgtaatttcatttcagcattctttcaatgtgacgcttcttctgatattgcagagttatttagtcttggccctgatgtaaaggagttggcatttctaaaatataagcttacataattgaatcagatgagaaatacaaatctaggaatcagaatctaatacttttcattttgtcaaacctgttaaatgagagtattaaatttaaaatactgaaataattttttaatctattcataatccttgttatatcagataggatattttaattctcctctgtaaaaattggaaaaatgtactgttgtcatagacttacataaacgttcaaagcttttagtagctcataaaagtgttttaccagaccatttgactaaagaatacccatagaagaaagaaatcaattcattcacagcatgattttttttacctcaagctaatatttaactaattataatgacaataagaatgagttaaaaaaataatgtctgagctagatatttattagaaaaaataagcactgtcttttagtttggttacttcagaatctataaatatgcatgggttccatctttgcaattcataaattcataatactctgctttttatttttatgtaaatatacctggggtagactgcatcactggtcttaattctccatctctccctgtaccacttcctttgccatttaactttacagttcatttccactgagggcaggacatttttttttttttttaagaccgagtctcgctctgtcgcccaggctggagtgcaatggcacgatcccggctcactgcaacctctgcctccagggttcaagcaattctcctgtctcagcatcctgagtagctgggactacaggtgtgtgccaccacacctggctaacttttgtatttttagtagagatggggtttcaccatgttggtcaggctggtctcgaactccaaaggcaggacatattaacaattctctgttcctgggctctgctgtgtggcttgctttggctactagaatgaggtagagatgagggtataccagctctgagcttagacctcaagagcccttgtgtatttctagtggcaagcttctcttccatcaccatgacaacatgtctgcatagcctgctctagaggatgagagatacgtggaacagggcagaggaatccctgtttcyccagccaaggccagctgatatcagctaactgccagctgactgcagacgtgaacaagtctggccaagattagcagagccatctagccagccctcagctggcccaggcataaacaatacatgcttattgctgaatgctactgaggtttttgtggctctttgttatgcagtactattatggaagtagatatctgatacattagttttgcggctctaccatcagaggtcaaaatatgttgacttgtatttttccagcagtggggatgagttgctgtaagctggttgctttctttcaaaaggttctcctaacagtataaatttgaggggactgattggctcctgggggtcacagaatagttttaaccctgtaaggctcagttgttcatgaaccagacagagatgcaggctttgaccttgacttcttttcacccacagttatcagttttacctcctttcctttgtttctattttttcctttttttaattgttcagcaaatattaactaaacatttagtgcttcctatgtcagacagtcattagrccacagactagactgagggaggatttgcaaaatgcacttaatttgagccaattaagaaacaatttaggtaaaacatcaatttggggatatgtgctgaatatttaggcgtacagtccttctatcaggagaacgaaaaagaaactggacctgctgtacagggcaatgagagaattctgcagatcctctatcaaactgaatataatgatgcccatccccctctggccagtcctaaataaagccacttctctgcactggagatgactcattgtattcacaataaggcacttgagaattactgtttacagaaagcatcaccagcagcagggtttaagaataccccacagtgaaaacacaaacacatttgtaatgatgagtgatggaaaaatagctcaaacctgcttaggtctgcaggtcttcctaccatactgtgtatacttgtattaggtggtagggaggaaatgccacactggaaagagaacactgagggtagatgtttgactacaatccaaattcctataaaagacacttctgaagcttctaacttttatggcagttttggatttacgatacaatagaagaagctgggagatggaaaccatgagaaaataaaagttcctttcactgctttggaggctcagtgtttatgtgatcrtttaatacaagataaaagtcacagggataggagtgtggagaactgattggaggagaattgttgtcaactcagccctggtggattgatgggggaggctytgccaggtcaaggttagtgaatgtcatcaaacttgtctggagggtttggatttgactccctggacaaagtgaattgcttgatttattaacaagctttgcttgctatttgataagcactataccaggcttggctggaggtgttcttgatagattggttggggagattaagcatggcatgagaacaagttaaaaaaaattatgtcaaatgtagtatatgtacaaagtaacaatcttatgtacaaaataataaagcacagatggcagtccattcattgaagatggtttttttcaaggtgagtgttkgtcttttgcacaatgcttgagatggaaatgacttggctgagactatgtgatgagtgctccagatggggcatggcatcggcatggggtaggggtggaaagcttcttggagctcaagtagcccttcatcctagaaactgcagcaaagctaagatcttcctgttcagtattttattaatgtctttaagaacttttcactgtaattatttcagaggcataatcatttagaaccaatgacatttggctcagtcacttactagttatatgactkgggccatgtattaacctgtgtttcagttttctcatctataaagtggagttatcaataatgcttctgtcataagtttattgtgaggatacaatgagccctcctgaaatactccatgtagaagtgctcagaaatgataactgctattgcatgtcaaagaaaggaatttttaattttatttctagaacctagcacttgtgttcttccattgcaggcactcagtaaattttgttagatgaatgtgtgaagagtggctgacagcaaggggccaaccacaaaaaagattgttacatgagatcaaatgagttcggtggaggaataatgagatcagagataaaagagacctttgattctttcagccccattgtagtatcrtttttacagatgagaaaacaggtctgagtacattcagtcatttgaacctggtgaacargaagatgatataaagatattgtattggagaaaaattattcttgggtggaaagatgaaaggagtcaaggaagtgagaacaggaaccatgggctccaaggtctataatggtagacctgacacagcagaggccgtgatggagggacatgcccaaaaatcatgcagagaaagagccaggagttagtgattaagaggagagctgagaacaccaaatgcgcgtatgtgacaaaggagttagtgccagttatggcctcttagctggtagcttcggagattatctgggtgaactcctgtttgctatttgtatgaaaaaccctgaatttaatgttctgacttcagggattggagactcacttaaactatgcagacagacatgcagttcttatttcaatttagatgttaaaaaaccactcctgcttgctttgacatgagaattctttaaaaaagtaaatcctctctcaaaatagttttgttttggcactggggataaaaagcatrtacatatacatataatgtctcagggtgtgtagtgttggggttatcataacctagatgttttgatattaaacgaygttcttttaaacagcttgtacttgtctttgtcagggaataccactaggaagaaggcagttctgggctcattaataaacactatgttcttattgtgtattctcaactagagtaggagatctacagatgtgtatcttgctctcactgtctgaggagatggatgcattgaaggtaagaggggcctcactgaattrtgcagcacttgctgtctcttggttgttcacaactgtggaagccaacctcaggtgactgagttcatataactccaactgccagaactttagggattcctttatttctcagatccctcacctcatgaaacacttcccacatgaggtccctttgactaagttctttcatgtccaccacagtcccacaataatgatgtgctatgtgtaaagggcaaggagaacaaagaaggcataaccaacttctggggttcagagtaggctccacagagcaggtgcatcctatttacactatttttcccataagatctcttgcattacaactgaaaagctctcatcagcaaattaatacatttcatattctctttgtacacgttttatgcttttatcagtaagagtttaggtaggtaacagatgaagagaaataaactaaggaacagtttcaaagatgtgggcaaggtcaagaaaagctaatgaggggtggtgcaagagcagaaggcagctgggagaggctatctgctaggaacttggggaaggaacccagccatcatccaccacagcacagaagggagggagttcaaaagataaatactcttgcttcactctcttcctgccttctgctctcctgccacttggccttcctgggacgycagagtgaagggatcccttaatgtagaccataaaggccagactgctggggcagattggacacaaggtagaaagtgttatctgaagaggcaatggataatatctagcaatacctgctacaagtcttggtttgaacattcatatgtatccatgtctaatcaaaatataaggtcattttcccctcaccccaccaagacattaatagttaaatatatttgatttacaactgatctaactggtttttsttgcctggatatctgccctagttatctctttagccgtggtttatacaatgtctgtgtctctgttctccacatcacctccttcatctgtctgtcctaaagctctttttgttttatactgttattgcatatttatcatgattctgtattctccatagtacaaatacatacataaagaattttgtttagctctttcccctgttaaggctcaaatcagtgcacactattaagtcacaaaataccctagtgaaatagatagtaatgcatacttaatgagaaagaggatgagagatagaaatttattcagatgattaagtgggtaaaattttttgtggccaagtgaaagattactcacaccaaattgtatacatagattcttgctgggatcacctatttcttggatactacattgccagggatcctggatctcttccttcttaatctcccaaatgcaacaagttctcttaaacaatattgacacctgagctgatgaacttggctgagcccagtacatgggtggtcatttgggtaaggaatgaactttttcataaaatccaacttaccaattttttttcgtagattatgctttggtgttgtatctaaaaattcgtygtcaaactcaaggtgacctaaattttctcctatgttttcttctagaaattttatacttttgcattttatattttagtttatggtctgtttggagttaatttttgttaaaggtataaggcctatgtctaagttatttttcttatttttgcatataaacatccaaatattcccatggcatttgttgaaaatactctctttttccattgaattgccattgcttctgtgtcaaagagcagttgattatatttgtttgggtctatttctgagctcagtattctgttccatttatctagtaatatatgtctattcttttgctaatacgacattgccttgattattgtgcctttatagtaagttttgaaattgcctattatgtgtcgttcaagcttactttactgtattctgttgattattctaggtttaaaacttaaatggataaactttagaatcaggtaatttataaaatagcttgctgggattttgatttggattgctttgaatttatagaccaagttgggaagaactgacatcttaacaatattgagtcttcctatccttgaaaatggaatatccctccatttatttagattttgtttatcagttttgtagttttcctcttrtagatcttatacatattttctgagactttatacctaagtatttcatttttggggtgccattgcaaatgtattttctctcatttcaaatacaaattggtcatttttggtatatagaagagcaattgacttttgtatattaaccttctattcttctatagtgaccttgctatactcactcattaattccaggaacttttcccctatcctttgggattttgcacagagaaaattgtgaataaagacaatttaattttgtcctccccaatctgtataccttttatttccttttcttgtcttatgtatttaattaggacttccagtatgatgttaactaggactgttgagaggggacatccttgccttgttcatgatcttagagagttactggtttctcactattaagtaaggaagtgttttgtagctgttctttatcaagttgaagaactttccctgcattcctagtttgctgataatttttattatacacggatataggattttgtcaaatgycttttctgtaccaagtaatgtaatattgcttttttttcccttagcctgttaatgtggtgaattacattcattggtttttaaatattaaaacagccttgcctagctagaataaatctcacttggtcatgatgtataattatttttatatattgttgtatttgatttgctaatatgttgaggatttttacatttatcttcatgatagatattgatctatagttttcctttcttgtaatattcttatttgctcctggtgttagggtaattctggactcatagaatgagttaggaattatttctatttcctgtaagagatagtggaaattgtatcattttttccttaaatttttggtagaattcaccagtgaagccatttgagcctggtgcttttgttttgatggttgttaattattgattcaatttcattggtagatatggycctcttcagattatctacttttccttttgtgacttttggtagttgtgtctttgaagaattggttcactttatctaatttgtgggcagagagttgtttgtactatttctttattatccttttaatgtccatgtgatcagtagtgatgatctttctttcatttctgatattagtaatttgtgtcttctctttttcttggttagcctaactagaggtttataaattttattgagcttttcaaagagctgcttttgatttcattgatttttgtctattgtttgctgtttaaaattttattgatttatattctgacttttattgtgtttctttttgttacaggcttccaaattgttctttttctctagtttttttttagagaaagtttagactattgattttatgtctttcttcttttctaacatatgcatttagtgccataattttcctttagatctactttactgaataccacaaattttggtgctatgttttcatttttgttcagaatattttcagtttctcttgagacttccgctttgattccatgtgttatttagaagtgtgttgtttaatcttcatttttttctattttccagttgtctttctgattttgatctatagtttagttctgttgtgatctgaaaacatacttagtatgatttctattcttttaaatttgttaatgtgttttttgatccataatgttctatcttggttagtattccatgtgagctttagaagatgtgcatacatgttaaggattattatgtctttgtggatacttgtctaccttctgcaatgcctttatttaagtatttttcctgaagtttaatttgtctaaaattaatatagttattccagcttccttttggtcagcattagaatgatatgtgctctatccctttacttttaacatatttgagcttttatttatttattttaatttttccataagttattggagtacaggtggtatttggttacatgagtaagttctttagtggtgatttgtgagattttggttcatccatcacccgagcagtatacactgcactatatttgtagacttttatccctagtccccctcccactcttccccccaagtccccaaagtccattgtatcattcttatgcctttttgtcctcatagcttagctctgacatattagttagaacatatggtgtttggttttccattcytgagttacttcatttagaataatcgtctccaatctcatctaagtgactgcaagtgctgttaatttatccatttttatggctgcatagtattccatcatatatctgtctatacacacacacacacacacacacacacacacacacacacacacacacacaccacactttctttatctactcattgatttgtgggtatttgggttggttccacaatttcgctattgtggattgtgccattataaacatgcatgtgcaagtatctttttcgaataatggcttcctttcttctggctagatacccagtagtgggattgctgggtcaaatagtagttctactttaaattctttaaggaatctccacactattttccatggcggctatactaatttatattcccactagcagtgtagaagtgttccctgttcactgcatccatgctgacatctactgtttttgattttttgattatggccattcctgcagaagtaagatgatatcacattgtggttttggtttgcattttcctgatcattagtgatgttgagcattttttaatgtgtttgttggccatttgtatatcttyttttgagaattgtctatttatgtccttagcccactttttgatgggattgtttgtttttttcttattgatttgtttgagttcattgtagattttggatattagtcctttgtcagatgtatagattgtgaagattttctccccctttgtgggttgtctgtttactctgctgacagtttcttttgccatgcaaaagctctttagtttaattaggtcctagctatttatctttgtttttattgcatttgcttttgggttcttggtcatgaaatccttgcctaagccaatgtctagaagggtttttccaatgttatcatctagaatttttatagtttcaggttttaggtttcagtccttaatccgtcttgagttgatttttgtataacgtgagagatgaggatccagtttcattctcctccatgtggctagccaattatccagcatcatttgttgaaaagggtgtcctttcccacttgatgtttttgtttactttgttgaagatcagttggctgtaagtatttgggtttctttctgggttctctatcctgtttcactggtctatgtgcctatttttataccagtaccatgctgtttgggtgactatggccttatagtatagtttgaaatcaggtagtgtgatgcctccagatgtattctttttgcttagtcttgctttggctatttgggctctttttttggttccatatgaattttagaatgtttttctaattctgtgaagaatgatggtggtattttgatggggaatgtgttgaatgtatagattgcttttggcagtatggtcattttcacattattgattctacccatcccatgagcatggatgtgtttccatttgtttgtgtcatctatgatttctttcaacagtgttttgtagttttccttgtagaggtcttttgaccccttggttaggtgtattcctaagtattttatttcttttttgcagctattgtaaaaggggttgrgttcttgatttgattctctgcttgcttgctgttggtgtatagaagagctactgattttcatacattaatcttgtatgtggaaactttgctgaattcttttatcagttctaggagatttctgaaggagttcttagggttttcaaggtaaatgatcatatcatcagcaaacagtgacagtttgactttctctttactgatttggatgccatttatttctttttcttgtctaattgctctgactaggacttccagtactatgttgaagaggagtggtaagagtgggcatccttgtcttgttccagttcttagagtgaatgctttcaacttttccccatttagtattatgttggctatggttttgtcatagatggcttttattacattaaggtatgtcccttgtatgctaattttgctgagagttttaatcataaagcaatgctggattttgtcgaatgctttttctgcatctattgagatgaacatgtgatttttgtttttaattctgtttatgtggtgtgtttattgacttgcatatgttaaaccatccctgcatccctggtatgaaactcacttgatcatggtgggttatctttttggtatgttgttggattcggttagctagtattttgttaaggattttagcatcaatgttcttcaaggatatcggtctgtagttttcttttttggttaggtccttttctgattttggtattagggtgatgctggcttcagaagatgaattaaggaggagtccttctttctctgtcttgtggaatagtgtcaaaaggattggtaacaattcttttttggatgtctggtagaattctgctgtgaatccgtctggtcccggactttttgtgttggtaatttaaaaattaccatttcaatctcactgcttgttattggtctgttcagggtatctaattcttactgatttaagctagaagggttgtatctttacaataatttatccatctcttctaggttttctagctatgtgcgtaaatgcgtcatagtagccttgaatgatcttttgtatttcagtggtgtcagttgtaatatctcctgtcttgtttcttagtgaggttatttggattttctctcttcttttcttggttaatcttgctgatggtctatcaattttatttatctttttaaataaccagctttttgtttcatttatcttttttgtttgtttgtttcaatttcatttagttctgctctgatctttcatgataacttcctttcttctgctgggtttgggtttggtttgcgcttgtttctcttgctccttgaggtgtgaccttagaatatcagtttgtgctctttcaatctttttgatataggtgcttagggttatgaactttcctcttagcaccgcctttgctttatcccagaggttttgataggttgtatcattattgtcattcagtttgaataattttttaatttccatcttgattttgtttttgacccaatgctcattcaggaacaggttatttaatttccatgcatttgcatggttctgaaggttccttttggagttgatttccrgttttattccactgtgttctgagagagtgcttgatataatttcaactttcttaaacttattgaggctcattttatggcctgtcatatggtctatcttggagaaagttccatgtgctattaaatasaacgtgtattttgcggttgttggatgaaacgttctctatatatctgttaggtctatttgttccaaggtatagtttaaatccattgtttctttgttgtctttctgtcttgataacctgtctagtgctgtcagtggagtattgaagtctccactattattgtgttgctatctcatttcttaggtctattagtaattgttttatatatttgggagctccagtgttaggtgcatatatgtttaggattgtgatatttttctgtkggacaaggccttttaccattatgtgatgtccctctttgtctcttttagctgctgttgctttaaagtttgttttgtctgatataagagtagctatcctgctcgcttttggtgtccatttgcatgaaatgcctttttctacccttttaagtttatgtgagtctgtatgtggtaggtgagtctcctgaaggcagcagatgattggtgagttcttatccattccgtggttctgtatcttttaagtggaacatttaggccatttacattcaatgtagtattgatatgtgaggtactgttgcattcatcttgctctttattgcctgtatgctttgatttttttgctttttgttttgcttcttaacatgtatttttgttttataggtcctgtgtgatttatgctttaaagagtttctgttttgatgtgtttccaggatttgtttcaagatttagagctccctttagcagttctygtagtggtggcttggtaataggtgaattctctcagcatttgtttgtctgaaaacaacagtatctttccttcgtatatgatgcttagttttgctggatacaaaattcttggctgataattgttttgtttgaggagactgaatcccttctagcttgtagggtttctccagagaaatctgctgttaatctgataggtttttctttacaggttacctggtgcttctgtctcacagctcttaagtttctttccttcctcttaactttggataacctcatgacaatgtgcctaggcaaagatctttttgtgatgaattttccaggtgttctatgtacttcttgtgtgtggatgtgtaggtctctagcaaggccaaggaaattttcctcgattattcccccaaatatgttttccaaggttttagaattctattcttcctcaggaacaccaattattcttaggtttggttgtttaacataatcccagacttcttggaggctttattcatattttcttattctttttctttgtcttttttggattgggttaatttgaagaccttgtctttgagctctgagtttctttcttctacttgctcaattatattgctgagactttccagagcattccacatttctaaaagtgtgtctaaagtttcctgaatttttgattgctttttctttaagctatctacttccttgaataattttcccttcagttcttgcattattttttggatttcctggcattgggcttcacctttctctggtccttccctgattaawttaataactaaactcctgagttctttttcaggtaaatcagggatttattcttggtttggatccattgctggtgaactagtgtgatttttttgtgggtgttgaagagcgttgtattgtcatattaccagggttggttttctggttccttctcatttgggtggcctctgtcagagggaagatctagggctgaatgctgttgttcagattcttttgtcccacaggtgttcccttggtgtagtaccctccctattttcctgtggatgtggcttcctgagagccaaactgcagtgattgttgtctctcttctgagtctagccaccccgtgagactgcccagctctggactggtactgggggttgtctgcacagagccctgtgatgtgaaccatctatgggtctctcagccatggataccagtgcttgttcaggtggaggtggcaggggtgttcaatggattctgtgagggttcttagctttggtggtttaatgctctatttttgtgctggttggcctcctgccaggaggtgacactttccagaaagcatcagctgtagtagtatggagagggcctggcagtgggcagtgccctagaactcccaagattatatgccctttgtcttctgtttccagggtggatagggaaggaccatcaagtgcaggcagggctagacatgtctgagctcagactcactttgggcaggtcttgctgcagctgatgtggaggatggggttgagatttccaggtcactggagttgtgtacctaggaggattatggctgcctctcctgagtcatgcaggttgtcagggaaatgggggaaagccagcagtcacagacctcatccagatcccacataaactgaaggtctcactcccactgtgcccccacccccagtagccccgagtctgtttcctggcggagggtgtgacaggctagaaaacttgcactgggctacccacctcccagctgcgaaagaaaagggcttggtttttcccctgcctgtggagtctgcacaccagatttgcaccctcccgtgacttctgagcaggaggcttcccacccttcaaattgttacaaagttcagctagagattttcttcctcctgtggagtttatcccctgctcctctggtcaccctcccaatggatccctgtggtgccaggcaggaatgggctgctagggtacacagcaagctcccaaggcctttctgctgcttcctctcccctgtatttcacttggttctctaaattgactcagctccaggtaaagttggaaacttctcccacaaacagaccttcagcttctccattgagggtctggactggtactgggggttgtctgcatggagccctgtgagaggagagtctccttttcccatttctgcagttagggcactcacagtatttggggtgtctcccaggtcctgcaggagcagtccacttccttcagagggtctgtgggtcctcttgggatttttggtttgtaattgcagtcgttctggagctaaaattcacagtgtgagcttctgtacgttgctgtctctggagctgtaatctagtcctgcctcctgtctgccatgatgatcccacttgagtttttaatatttagtttctggtaggcaacatatatttggaccttgttttttcaatctactctgacaacctttttgtttaccttgtgtttttaaacaattaacatttaaagtgattattggtatagttgtataaatatctaccatgttcatatctgttttataataattgcatttgtttctttttttgttccagtattttcctgccttgtctgtttttaattgagcacttcatgtgattttattttatctcctttcctagcaattacatttcttaaaaatttttttaatagtggtctagagtttgcaatataaatttttaacttgtctatatccagcttctaataacactctaccattgcatctgcacttcaggttcttactcataacagtatccctcatttctccctcctatctgttatgacattgctgtcattcatttcacttattcatattstataatcaaccaatacattgttactattattattttaagtaaacagttatcagatgattgtatctccatttattccttctgtattgatkttcctttacatagatttgagtttctgacctatatcattttcattccccttaaataatgttttttaaaaaatttctgcattacaggtcttctggtaatgaattccctcagggtagttattattattttttgcatgaaggaagtccttctcttttacttttgaagaacaattttgctagatatagaatttccaggttggtgatttttgactttcaacactttaaatatttcatttcattctcttcttgcttgcatggtactgatgagaagtctgctgtaattcttaaacttgtttttctataggtaaagtgtttgttccttctggcttcttytaaggttttctctttgtagttggttttctgcagtttgcatatgctatgcctacaagtagtttaagtgtttatcctgcttttctctgaacctcatggatctgtggttttgtgtttgtcattactttcaagtatttcttctgctccactttttcttctttttctggtattcaaattatgtatgttacactttttgaaattgtcccacagttctttaatatattcttctgttttttccactatagttttttctttttgcattttagttcttgaagtttatattgacatatcttcaagctcactgattctttttatagccatgttcagtctactgaggagtccataaaaggcatattcagttctgttagtgtttgatctctagcatctcctttagattctaagacttttcatagttttggttacattagtcatctgttcttgcatgctgtctaattttatcattagacatttttttcattaggtgggtaagcttcatgagtgatggagtcaaggaaaactttctagtgcatgtaaaattatatcaaatagggagttgccatctccttataaaactaatctgggtagaagctgtcatttatgaaagagaggctgatctattacactcaacacaaaagctccctgtttgtccataagctgttcccataagtgactaccttaagggaaagaagcacctgtaatataagcattcacatgtaggcttcagaagtatggaagcctacgtactggaaaattaccagcttagaactgtgattactggtaagatacttgatgtttatgaacatcagagaaaactttgaaacagctttttatacatggttaggaaatagtcattcttgtatttgcccaatcctagcttcaaattcaacttttggtgctaagtgtgggtaaaaattggtacccaccttgatgcttttcatcttgcttctgatagtactacccttggaagagactgaaaaataaytgagaagttaaaagccttctattgtgactaagaaatattaatacaatttattgaaaaaacgcataggtagaatgaatgtaatagtttttaaaaaagagaatttgaggaccaagaggaccaattaggctaccaggagacatcctttggtcagctctcctgagggtaaagttcataggccaggtcagtacctcaggaagcatcctttccttctgttcagagaatgggttggcctgaggtagaagctggctttggttcaaactttaggcagacaaatctttctccaggggtcttcttgcctctacttttcctacttcctagcatggctgccatgcacaacatctgagtttgcccttcttttcactatatcctccaataatccctgttcagttatgacagtgaaagagggaaacaaatggacaggacattacgtacatcttgtgtacgtttgagaactattagcattgtagtcaattgtggatagaaaatgtatgtatgatgaatatctaaatattgaggtctaggggtgcgtgtgtgtgttgctgtgaatgtttctggtgttcattcccacctgtcagttatctgcttaattgtcggttaagggctaatttaatttatatcaaaaagtcagttttcataggttaagaattcaagagcaatttatagttttacagaagagtcttgaagatagtaggtgaaaaataatctcaaatggtcaaagttttagcatcaggtagcacctctagacccttacctgaagaatgcctctcctaaatctgaaagggttgaccaggtgtgcgcctttaggacgatgcaaggcaagaaggcagggaagaatggtactcctagtcagtcagatcagacggatcaatcttggtgatgaatggggacagatgtcttaggtgggccaccccatatcgctccaggaagattggagggcttttaaggtagtcaacccacttatactaaggccactgttttaaacatcatgagttgtatcatgtcattcctctgcttaaagccctgcagtggttccctgtttcacccagagtaaaagacaaagtcgttttaaaggtttaagaaagctctgtacaatctgatcctcctgacctctctaatttcatctactactcctttctttccctttcactctctgcttcgtgtccttcttgcttttcctggaacgatccaggcatgccccttccccatgacctttgctctggttggttttctctgcccagaatacactttccctagatgtccacatggctaattctcaacttattcaagtctttgatcaaaagataccttcccaataaccaatagctaccctattaaaactccaatgtcctggcactcgtttatcatgctgaattcattatttttttctatagctcttactgcattctaacatattacataatttacttgttcattatgtttgttatttgtctgtgtttttctattaaaaggcaaccttccagacggcatgaaataatattcctggtgcctagaccagtgcttggtatggtggtagatggttaatagttatttgttgaatgaataaaggggcgaataaatgcatgttagttacttgtcttctattcctttctaggaagtgttttcttctagttttcctataatccaccatcttaagccagctcacaattttgatgcaagcttgtatgagacaaaaagtaagaaagtcaaagaatctgagaaaactccagaaagcatgttggtacaaagcatgtttgcactcagagcacataacgttttaatcctccttcctttaggtgacaaaattatcttaaaaattattttatatgaataatatataatatgcataataatggccataaaggaaatacaaattgtggattttttttttttttgagacggagtctcgcactgtcacccagcctggagtgctaatggcatgatctcggctcactgcaacctccacctcctgggctcaggtgattctcctgcctcagcctcctgagtagctgggactacagccatgtgccaccacacctggctaattttttttgtatttttagtacagatggggtttcatcatgttggtcaggctggtcttgaactcctgacctcaaatgatccacctgcctcggcctcccaaaggcctgggattacaagtgtgagccaccacacccagccaaattgtggaaattttttactggacttcatatatataattatgcttttaaaaagtaaagaaacataaaaaatgttatgtacataaaaggaaaaaagtaatggattggtaattttaattacattagtataaatttttgcacaaagggaaagaaccaattattggtttatgacagtaataaataatattaaagtttattaaataatcacaagaataacaaaagaaatatcaattttaaagatattattaaagtttagcaaaatcatgtataaagtttacacttaccaataaaaatactacatctcacattctgtacttcatttygtcactttacatttttaaaaacaaaaattccattaatcatgtggaatgatgaatttacttgtttctttttttttgcaagtaatatcctataattatttattttgaatcttctgtttaaatgtcagaatatggagtatcataagttttttcgaagtgagctggaatgattcccaaaccttcacaaacttgcttatggaacacatatgtgtgtgtccaagactgcatgtgtctggagtcagctgtataactgggatttctctgaattagcttacttgtagattataatatatacaggcataccttggggatgttgtgggtttggttccagatgatcacaatgcagtgaatattgcaataaagtgaattacacaaaattttttgtttccagtttatataaaagttatgtttacactatattatagtctattaaatgtgcaatggcattatgtctaaaaagtaatgtacataccttaattaaaaatttattgctaaaaaatgctaatgatcatctaaggcttcagtgagtcttgacttgatgttgatggctactgactaatcagggtcgtggttgcttaaggttgggatggctgtggcaatttcttaaaataaggcaacaatgacgtttgccccatcaattaactctttcataaaatatttctctgtagcatgctttgctgtttgacaacattttatccacgttagaacttccttcaaaaattagagtccatcctctcaaaccctgctgctgctttataaattaagtttatgtcattttctaaatcctttgttgtcatttcaataatgatcacagtattttcaccaggaatagattctatctcaagaaaccactttctttgctcatccataagaagcgacttctcatctgttcaagttttatcatgagattgcagcaattcagtcatacttaaggctctacctctaattctagttctcttgctatttgcatcacatctgcagtactccaccaaagttttgaacctctccaagttgtccatgaaggttggaatcaacttcttccaaactcctgttaatgttgatattttgatctcctgagtcacgaatggtttttttaattcattttttttatttcaatatgtttttgggggaatagatggtgtttggttacatgaataagttctttagtggtgatttctgaaattttggtgcacccatcacccgagcagtgtacactgtacccagtgggtggtttttatccctcacccttctcccaccctttcccctgagtccccaaagtccgttgtatcattcttatgcctttgcgttctcatagcttagctcccacttataagtgagaacatacaatgtttggttttccattcctgacttaacttcacttagactactggtctccagtcccattcaggttggtccaaatgccattattttcttcatgtttatggctgagtggtattccatggtatgtgtgtgtgtatcacaatttatgcactcattgattgatggggatttgggctggttccatgtttttgcaactgcaaattktgctgctgtatacatgcatgtgaaagcatcttttttatgtaatgacttcttttcctgtgggtaggtactcagtagtgggattgctggatcaaatggtagctctacatttagttctttaaggaatttccacattattttccatagtggttttagtagtttacatttccaccagcagtgtaaaagtgttcccttttcaccacatccatgccaacatctattattttttcattttttgagtatggcgattcttgcaggagtaagttggtgtcacattatggttttgatttgcatttccctgatcattagtgatgtgggtggggcattttttcatgtttgttggccrtttgtatatcttcttttgagaactgtctgttccatgaatcacaaatgtttttaatgtcatctagaatggtaaatcttttccagaaggttttctacatattttgcccagattcattagagaagtcactatctatggtaggtatagccttacaaaatatatttcttaacaataagacttgaaaattgaaattattccttgatccatgggctacagaatggatattgtgttagmaggcatgaaaatcacagttatctccttgtatatctccttcagagctcctgggtgaccagttacattgtctacgaacaataatattttgaaaggaatctgttttcctgagcagtaggtctcaacagtgggcttaaaattttcagtaaatcatgctgtaaacagatgttctgttgttcagactttgttattgcatttataaagcacaggcaatgtagatttaacatcattcttaagggccctaggattttcaaaacagtcaatgagcattggcttcaacttaaagttaccagccacattagcccttaataagagaatcagcttgccttttgaaactttgaagccaagcattgagctttcctctctagttaatcctggatggaatcttcttccaatagaagkctgtttcagctacactgaaaatctgtttagtgtagctgccttcatcaatgatcttagttggatcttctggataacttgctgcagcttctacatcagcccttgctgcttccccttgcacttttatgttttggagatagtttctttccttaaacctcatcaaccagcctctgcttcaaactttagttctgctggctcctcacctttctcagccatcatagaattgaagagagttaagatcttgctgtagattaggctttggcttaagggaatgtgttggctggtttgatcttctgtccagtccactctaaccttctccatatcagcaataatgctgtttcactttcttatcattcatatattcactgggtagcacttttatttccttaagaattttttcttcatattcacgacttggctgtttagtgcaagaggcctagctttcggccagtctcagctttttatttgccttcctcattaagcttcctcatttctagcttttttttttcctggcttatttttgatttttattccacatagaaataaataaaacattttattaaaagttagaggtttttttttttttatagtttctgcagtacatgtgcagaacgtgcaggtttgttacataggtatacatgtgccatggtggtttgctgcgcccatcaacccgtcatctacattaggtatttctcctaatgctatccctcccctggcccctcagcccccacccgacaggcccccgtgtgtgatgttccccttcctgtgtccatgtgttctcatggttcaactcccacttatgtgtgagaacatgcagtgtttggttttctgttcttgtgttagtttgctgagaatgatggtctccagcttcatccatgtccctgcaaaagacatgatctcacacttttttatggctctatagtattccatggtgtatatgtgtcacattttctttatccagtctatcattgatgggcatttgggttggttccaagtcttygctattgtgaacagtgctgcaataaacatatgtgtgcatgtgaatgtgtctttatagtagaaagatttataatcctttgagtatatacccagtaatgggattgctgggtcaaatggtatttctacttctagatccttaaggaatgaccacactgacttccacaatgttgaactaatttacactcccaccaacagtgtaaaagcattcgtatttctccacatcctctctaggatgtgtttcctgactttttagtgatcaccattctacctagcgtgagatggtatctcattgtggttttgatttgcatttctctaatgaccagtgatgaagagctttttaaaatatgtttgttttctgcataaatgtcttcttttgagaagtgtctgttcatatcctttgcccactttttgatggggctgtttttttcttgtaaatttatttaagttctttgtagattctggatattagccatttgtcagatggatagattgcaaaaattttctgccattctgtaggttgccttttcactctgatgatagtttcttttgctgtgcagaagctctttagtttcattagatcccatttgtcaattttggcttttgttgccattgcttttgtgttttagtcatgaagtctttgcccatgcctatgtcctaaatggtgttgcctaggttttcttctagggttttcatggttttagrtctttcatgaagtctaggttttgatttatagtgagaggcttcctttcacttgaacacttagaagccattgtatggttactaattggcctaattttaatcttgtgtctgagggaataggaaggaaaggtctgagaagaaggagggagatggaggaatggctgatcagtggagcagtgatgacacacacaaaacttattgattaaatttgccattttatatgggcacagttcgtggtaccccaaaacaattataataattccatcaaaagtcactgatcacagatcccgataaaggatataataataatgaaaaagtttgaaacattgcaaggatgatcaaaatgygacacagagacacaagtgagtacatgctgctggaaaaatgacagcgatagacttgtttgatgaaaggttgccacagaccttaaatttgtgaaaaatggaatatctgtaaagtgcaataaaacgtatgcctgtataaaaggatgagcagtaaaaacgtgctaatttaaagtttgcrtatatattattaaaacccaacagtaaccacaacaattgttagaacttatacaacaaaattttggtggggagggaacagcattttatcacttatattagttagaattgttggcatgtacatgatgataaggagcagactggtttttggtcagtttcattattaaaactttattacttgtataaagtgtttgttatgtttgtaaattctctacagacagggtgcctcctttttgcctgcagattgcccccactttccaccttcagccacactgggaagccagactctaaaccttctatgcccagattttaaaaggatgttttagagttagtgatttcctactcttagtgaagaaactttcaatttaattcaactcatgcttgcagatcataatttttaatccaaacacaaaaggagcaaaaaaagaatcctttcctttgatcagggtaaagtattgtctggaagattaaaataagttacaccagagggcacttgaaggtgaccaatactagtttaaacaagttatttaagaacaaatattcagatcctttaaraaaatttaaactagaacaatccaggatattttcataagaggactccataaggatgtgagagtgcaaaaagctagcattttcaggtatcttttcttctctgtaatattttaacttgtgagatgagattgagtttttgttatragaaagcaacattctctctcatattaatttgttttaatatttaaaacattaattgttgcacatactaaagagctttgtgttcagtcccatcgccgcctttcctggctcctggaatgttttgtgcatgagccaatctttggttgatggctccatcccagcactcatgtggaccctgcaacaagctgaaaacctggctgattttgtatggccttcatttatcacaacttcagaaacgaggtttattaatctgagttgctgagttcctggctggcaaagaaaggctctaaatttatgtggcttaagtgaattccttaatcttaagaatttaatttctgagccttttatgttttctaatcttgagtgatctggggccttgtgcataaagaagaaggaaaaaaaatcaccagagagaagaagcaggaggtaaagaggaatgttaagccaagatatttatttatatttattgcttcacagtgggaaaagtccaggatctcaggattaaagtatcctgtattattttatatagctagaggtgggtgtgtgttttaaaatcattccattaacccaattacaaaggagtcattggtgatgattttcattagtagaaattcttttcccttgcgaaaaagcatcctatttatcttcctgattctcctgatactttataacacacatccttattttattcacagattttgaaattgtcagaaaactgatgtcagagctcttggatcatgttgcttcaactctcccatgcccagatttctctgattcccccactcctaccagtaccaaaaacacacctccccraagttagcagcttcttttgggatctcctttcactttggctatatatggcagcaaagagaataaagaagagggagtaaagaggtggaataattcagtgacagtgactctgatataaaaggaaaacagctgaacagtggcatgaaaccagtttaaaggtgtaaggcaggctgtgggcaatttcttaggaaacaaaggtgaagaaagtaaaaggccacctttgtgaaaaggcagcaagagaagactctgtcaacagtgtgaagaagttgcggtgacaaagcaccatgtttgaaaaattaggtcagtattaggaagacaacatgaggaagataacatttaaaatgaaaggaaaaggcaggtttggaatgcatgctgaaggtttacgatgtgaacttgtccaccgatgagtctgccaacccaggttgggattctggattatcatggctactgagttggaaaatatatcattcccaaatatttgaaagcttttgatatatatttaagagggctttttaggcagtaaaatgagcttaaaaactaatttcaatatgtgttttatcatcaaaatgtcacccttttagaaagggcatcccagtccactgtaccaaaaatcatattttccatcatttttactcattttagttttgccatagcatttagcactagttgaaacctgaatatatatatatatatatatatatatatatatatatatatatatatatatatctgtttacatgtttattatctgcctctcctgctagaaaggaagctccatgagggcaggggctttatgtttttcaccgttacatcctcaggacttagaaaaaaccaggtatatagtggaatatttgctgaataaatggtaatatagtacctaacgttgactgaatgcctagtattagccaatctcagactcattcaatactgatataaattctaataaataagtactgttattagtcccattttgcagatgataaaactgaggtctgagaggttaagtaacttgcccaaggtcacctagggattggtggaggtgagataataatttctaagaagagttccttttgggccaatatggttaagacagactttaaaggagaggtgaaacaagctaaattttgagatgagtgttttgaagtggagagagggccaggtactctatgatagtgtgaggaaaagctgcctacgatggctatgaaagaggtttttataaagatttccaacaaggtgtgctgagaaataagattggaactctccaaagtctgtgtgtgtgaaggccagtccaaactgaatgaatacattgttcaagtttcaaaagaatttaagaaatagtttataatacagatctttgctgagtcagattgaattgttttcctaattacagtgaattattgagattttactgtctagtcccagttcagaaaggaccacaaacacatcacttgcagcctttacttttagggctaactccaggcaaaattatgaagtaggccattgttattgtattagtcgttcttgcactgctataaagagatacctgactctgggtaatttataaagaaaagaggtttaattggctcatggttctgcaggctgtacaagaagcatgatgctggcatctgctcagcttctggggaggcttcaggaaacttacaaacattgtggaaggcaaagggggagcaggcacatcgcatggccagagcaggagcaagagagtgaggggggagttactatacccctttaaatgatcggatctcacaagaactcactcactatcctgaggacagtgccaaggggatggtgctaaaccgttcatgagaaattcagttccagatctaatcacctcctgccaggcctcacttccaacattggggattacaattcaacatgaggtttgggtagggacaattatccaaactatatcattcatcttgctgatattctctgctcattcctcctctgctcctgtgtcagtccaggtccctatgggaaacagcatctcccaaaggggtgcttaaacattttttttatcattaaaaaatttctttatgatggaaaaattttaaacatgtgcaaaagtagagggaaaattataaagaccctgaacgcttttactttgatgattaccaaatcatgatctcttagctttgacggttatcaaatcatgaccaaacacgcttcatttaaatatcactttgtccctaaatacttcaggatgtatctctaaaaggtaaagcccacttgaaaaaataatcacagtatcattcttatacatggataaataattctgaagaaagtggttatggaaggatttatttataaaaggaattaagggaattcaacatgggatggtgaagcacccatgccctagttacagggggaaccccctacyacctaggcttgaagaagctgctgaaacccatggaggttgtatttgtaggagagttctgccaggcaggagctgtggccttcagcagagaaacagtcactgccaacccagcagggaaagagggtgttatacgtaactcaatttgtctttcctactttctcatccctggcaagtcctttgcactgattaaactcaacaagaagccagagagaagggcaggctgttatggcccctgcctgataagcttcctgaggcctcaccagaaacagatgccaggtctatgctccctgtacagcctgcagaactgagagccaattaaacctcttttctttgtaaattacccagtctcagatatctctttatagcaatacaagaacagcctactacaacccctatccctctgttacacaccttcttctgaagatatcttttcaggcttgcatttaccacactgtaccccagaccccggatctatttctttgggccccacccatcatccacataactaaatacaataatctactctgtgaacagtgataaggagtagagttagatattttggttaagaaagccctttcccttctaaaggcattcttattttcatccaatcttgatggtacaaaacaagagctatattttaatatgctagcctcagacattgataaatcatggcatagggaagctactctgactgcctttcaaacttgtttcgctttgctgtgttccaattaggtttaaaataatagatgagaaaaagtagttctggttcatttaagacaagcctccagtaaaaggcagtttggagttcgctgttggaagccagcaagggttataaaatccagagcctagttaaataaatccttttactattaactccctactcagacaggagggagaaaccagaatggttagtctagcaaaaagagagaaggggagatccttatagttaatacttggttacccaggcaaccattccctgactgcaagaaagccatcctgaagtcttgattagatggaagaaaaaggcctgggatmttcctttctgctgctttctcttctggcctgggaaaagaggaaccaagaaataggaataagtgggaaaaagccctgaacggaggtatgggtgagagagaggcggtggctgagggaggaaagctgtcttttcactggtgccttcttgttagagctkaggaaggggctgccccaaaggcttggagcctcttagtctttccaaaccacagatcccacctgtagctcctgttctttgtggcctggaaggccccagggctccaaaatatcttagttctgggagaaaaccacagacctggaagcacagaattttcagaacataagaggatcttacaaatgctatatagttcaacattgtataaccagaagagttaaaggacccatcaaggatcacacatcttgacaggtgtgtgagcaatgagtaatattccattgtgttcactctaacatccctgtgatcagcatgtgtcttgcagttgatgtgatgaggaagtactgagttataatttacytgataattttttttctctcatagtagcacataaaataagggtacatcgtataatcagtgatccttaaatccactgaaatagggtaaacagtgacagaatagtgtgtgtttctgctgatgcaccctttaaatctttttttatacatatatttttattatactttaagttctagggtaccctttgaatcttgtttgtcattatagttgtctttattcatgtcttatagaaattagttatttaatagtttttttggtagaaaaagtgcattcaagtaaagaatggtatattttctttcagatatcatcgttcatgtttggaataagtcttttgcttcagcagctctactgtacacatgcatgcgcacacataagtgtatgcatggacacacatgcactaaagtaatgcaattctcacatcagccccctgcaattgcttccctagctagagctgactgagactgagtgtcagggtttggtggtgattggatgatggaagaatcaatttgtaggagtataggctggaaatgggagggaaaatctaggactggaagaaagattctatctctccagctgttccagtagagcctggacctccctatctcacagatcagcttcctcttttgtgcatcttgttttttctaaatcttgatgtttccctcctcttttccttctttgctcttctctcaaagatcaaagggccacacaggtgggatttatcttgtgaagacaggaacattatgtagtttgttgttttcctacctcaggttcatggttcttaaaaatttgtatagtcgcgtttcttctttcaattaaaattgtttttgttgtaagtaaaaattttaagtgtatgataaagaatgtttaagcaactcggaacagtacagagaagaaagtaaaaagaatgacctctaatcccatcatccagaaataaccatcgtccttgactgtctttctcttctaatctgagaactcttgtttctactaagaaaagaccactcaggctctgctttttggtgtttgatccacttttctgtttcctgggaataggctgggagccagagagctcagtcgaggtgggtgcaggagttagtctggattctcacctctgagagaggtaatgctaaatgttcacctaagggcggggggaggggggtgacctctatccctggaggcgtccccacttgcttctgatcctccctcaattcatcctgtagcctagaggcttctcttttgccagaaaactgcttttttctccctagcatcccttccacagctccccagaaaagggaaaaaggcccaccctactaagttcgcctctttccagatccattattgatgtgagggtgcaggattttgcagctctgctgtgtaacttgtgaggggtgtgtgtgtgtgtgtgtgcgcgcgcgcgtgatggagcctccttacacccttacacaggccgccctgctctgctctggaatcttctttgtttttcctcacccattattttctgaggtaatggccttggcttgtggctttttctttgtttgctatttgttggtgagtttttgttttaatttttatttgctagtttttgtttatcttattaaatttggatagagggacatgacatgagtgagtttcttctatccttcaaccctgcaagtcccgttggcaggtttccactcccagttaatgtgaatttggtaaactcactaatcaaacaccctccttttttgcaaggaggggttataaagacctcagagtgtatattggtggctggggtttaatctaagtaggtgtatatatgctacctctccttttatgtggtattagattagtgttttcttgaaagagatgtatgttaatagtctttaaaataccattttctagttttcttatgcttaggcaatgcttttataaaacctctctattaaacatattcttttacattccattacagtatttattctttagttttgctttcctactttagaagtgaagtcaattttcagaatcaccttttatttgtgaaaataaagtaggatgcttcagttttgcgagcatgttttattgcaatttatgtcagtttttcagggaggaattcagcatttggattattttgtttaaattttaggatgctgtaatttaataaaaaccaagtctttgtctttggtttatttgccatttaaataaccgtaactcttatgaaaaacagtgtaaagcttcatggtgctgtatacatgtatagctagggaagaaaagcctgtggcaaaatgactgtaaatatgatttactaaatgaggattatcttaaggagatacacacaatttaaaaattacaatttttttaamgttcaactttcagtcctgtcattttttttttctcccagaaatttacatggctttttattgccatgtatttattccagcatgcttgacaactgtgttgaaatcatgctgcaagcttttatacagctgtttcagcagtgccatacttttaaagttagtagttgccttgtctaaaagctttgccagtgtttcttttctcctgacattctatgtaacaattaattaggtcatctttaaaaatagatgctggtggctaaactcaacatacgctcagtgtttcctttctattaattttctgtgctcacaagtactttaccttgcatcttattatcaaacagtgactaaaatscttaatttaaatgagtaattttagacaagaagaactgtatgtagatcagatctgttattattagttcgcacacaacaaaagtgatgtggagaatacccgggagagatgaaatcaaagccttcgtttttgttttccacagcctggtccactgagcagctgtaaccacttgcacacagcctgctcttaccaaacctgaatgcaaggaggaatgcatcagcgtaatttccatacaggctttctcctggggagcatgcttcatggcatattgggggaccaagaggacttgcttggagagttttgtatgctgtcactccaacttaagttagggcccttctagaggtggtgaggcagatagagaaacagaatgaaaacaaccagttgtttattgctaccacctacagctagggggcagtaaaaagaccaggagagcatattcagcctttttttttttggtatagatggtgtgatggtctgaatgtttgtgtccccctacgaattcacatgttagaacctaatacctgatgaaatagtattaagaggcggggcctttgggaagtgattaagtcatgagggctccactgtcatggataagattagtgcccttataaaagaggctcccttgctccttttccaccatgtggtgacacattagcaaggtgccatctttgaagcacaatcaagccctcacgagacactgaatgtactggtgccttgatcttggacgtcyctgcctttgaaactgtgagaaataactttctgttgtttataaattacccagactaaggtatttttattatagcggcagtaatgattgaagacaaatggaatgtcatgtcttcacccaaatgtctggacaaccattggattcctgagtttttttctgtctccactgacaagagagtggacggtgaggatgtcctttgtctgaactggaaaagacaatttgtggctggcctttcagattaggacagttctgagagctattccatgtcctctctaggctgacaggcttttatgcctgacctggtctcaatggtgtactctcttgaggtggggtaaggacatctctgaaaacagcaattttaggactattagagctgacaaagtctgggtttacttgtataaaatctttagttgctatcttgtaattttttttctattctctcaaatgccaataatgtctgactttcagcctccacccatctttgatggggttgtttgttttaattagatcttaggtactgagagttatgttaatcattatccttagtttagagcacattgccatcactgattggtgcaaagccttcttcttgtcttattttctttctctttcatcttctctgatcactgctccaattcccttttctcccttagcattcactttggtgtctttgatgtaattgttttacataatgtgtgtaaccttgttaagtctgtggtattgttttgcgtgtgaatgtgtttttaatttttatcagtggtatygtactataaatcttgctttgttttctacttttatccatgtagctatgtttatcattaatacttggttaggctgcagttacaaccaacttacatttttgtgtcagcaacaatgtatatttttttcatccatgataaaatgggttggctgtggttcttcaaaattacagtattagaccatccactaagtcttgttgtgttctcattaataagggagaacacctattactatatcataaatttgttttttaaaaaatattttggtaactatttttcaacataaatggttttatttataatcttatgtattttgtgttatgcaattaataacaatttttaaaattttttcattttagaatgagtccatagaattcaccagattgccaaagtgattcatggcaccaaaacaagttaagaaccttcagtgtagtctgttagtccttgattcttttctatacatttgacttcttttttccctctcttctctcctgtcctcttttgtcctcttctctcctcctttcttctccccatcctcttttctttctttttctttctcctctttccttatttgttctcatttccttgttctttcccctccttccctccctctctcccttcctctcttccttcttttccttgttagacctttaatctatagtttttcccctttctttaattcatagaaattttcaggagttatttcctcaactgctttattakcctctcctctgagactgttgttaaaaagatgtggacacttgtatattccacagatcttaactattacactttatatcttttttcttttccaataccttatgagataatttctgcatctgctctcaatcattgtttggttgtatccattctgctatttattccatctaggaagttgtttcaactttatattcttcatatattgtttttcttttcagatttttataacttcttgttcctgcttcatgttatcaataatctctcttccctctttgatgacatttattttgcttattttaacttctcgatttctcgttttcattagttctgatttattgggtgtaagttgttcagtgtattgcctctcatcatgactgctgccttgaaccctatcccactttgtctgcttcaggtatcagtcatatagaggaagagccagagccagatcctagtctttgtcattcctggtgagtttaagaagaggagggtgatggagtgccccaggacacagagttcatatcaccaaagcctgtacttgaggttagcatttgctgcctctttataagaaactctgctcttaggtaaaactgtctatgcctctgctctgagcctgctctctttttacaacttagtttgctacttggttgtcaagtcctaagctttgggctgtggagagggacagtgaggtggaggaaccgtttaggggtaggctaatcttctcccaatgcagcccagattccagctctgccccaaatataccccataactgctacgaaggtgggctggtgctgctattcttccaccccagtggtaagagggcaagtgaagttgtacagagcaaagagaacacaactcatatgcatagccccagcctatccactcacatactgcccctccttcctccacactggctgccacttttcttccacgcttgcttacgaccaatctctttctcctcagagtttcttcatagtctttatcttaggtttccagatttatacccttgtcttttatgagtaactactgctagaattagccacatcttacaacaatgggctctgggggttattaaacrttggcagccttcaagagggcgtcaattccaggttttctactaccctctcctgtgctgagccacaagtttagccttctgttgttttccatgttaagatgttccttgattttcttccatgagcacaggtccctagagacattaaatcaaaattagcataaggaggacaggactgatttcattgtctttctctacttcttatataatgctaacatgtgtttccaggctgtttgtgtgcttattttataaacatgtttattgagtggaattttaaggtcttcacatggaaaaacttgtgaataaaacttttgtgaaccgaacttgctatttagttccagataagttctttctgtgcttttctttttgtttcctgcatggttcaatatggttccaattgccacatatccacctcagtccacktggtaactcagcctttcccttctcaagggttgatggtttagaaagacattcagcatgcagatgggtggggtatgcaatatatctctttgacctccctcatgtatttgttcaatgaagtaaatattttggaagatattttattttaaaagatcgatgagagttacgttggatgaatcaaagaaagaactgcatcctatttcaagaaaataaatttctccaaacaacatagctatgattctagagagtataaaagcaccagaaatgctgtgctgagttagatcagaccaactggatgtatcttgctcggtgctccagctacagtggcaaagatacaggtggcacttcgtgagtaagtgtggggtgggcatgccctgctgacaaagtaaatagctctaatttccacccagtgacatgctggaaccatcatcctagattatagctaagtcctccttggaacgtacttatactttcaagtctgtaccaattcttacaataaaacgtttcatgtttgccacctgctgtgtaaagtggcactccttttatttattctacagccaccttcttcaggctttcaggggtgcctttaattctaatatttgtgaatttggagaatgaacagtcttatttccataacccgcatgtcttttgttatawtttatacatctttaaatcaatatgaaccttcttgtttctagacagtttgagttcaaaaactgatagaataaagaaatcagttttcatttaaattatttctactttttagaaattttattcagactccagtagtgcatacatcrtatgtgttcctgaaattagttaaaaaaaaaaagttatagtccatgggttggaaaaaggaaatcaaaaagaattgatatctaagaaatgycatttgtctgcaaggtagatgaacagtaaaactcaattcaacagacatgcattgagaatctatgatgtgccagttgcttttcaagttatggggaacaaaggttaaatgtagtttcttccatgcctaaagccacgttcagggacacagtaggggtgggcttctttactctgtgaaaggggcgggacaggctttgtagaagaagagacatctgaggaggaggagtgggaatttataatggaagggkctggggagagaaaggactccagtgagagagaacatcacttacaaagcttgggacttacaacatcacttggtgttttaagccaggaagtactttggaatagctggagcataaggtgcaggaatggaagtagcaggaagcagctggagggaactacaggtggggaaccgggactggatcctgagcaagagagctaggcgtgatttattatttttctgcctgagttccaaggaaaagtgccttttgcaaagttggaagctggagtacagaatgacaggtttcctttaaagcttttccccaaactccaggttgacaagcacagttttcttacagaggcagtgatatatggtgctacactgattcttttgatcctgtttctagaatcctgctactctcaaaggtggttttcagcagaggtgactgggcagccatctcatactcaccacccgtgctcctcacgtcccctcacttgtacctctcctcagctggcttcctgtgtaccagtgacctaccttgaatgtaaaatcgaggcctctggtttttctttatgtatatgttggccttcactatcaaatcaattgtgttttgcaaacctaaaagaaggccagtatttatttaccatttactgtttgtgttcagacaattcagatatttgccatttctaattgagtcaaatatgagcatctaccttgtgccaggagctgtgctaggtgctggtgacacaaaatgaattaaatcattcagtagtagggtaaattgacagaaatggattgagagatttgatgcttctcaaagttcatagtcaccaacttcaaattgcctaattatccgctatttcccaattaacttgctctaccatatcccaaagtgactctttcaagtcaccactctccccacttccgctttctcaaaaaatgactttctactacttcacagaggaagtggaagatatctgacccataccatcacaacttcctccagacctttcagcctataggctaattcatcatgtgtccctcctatcaaggtttcggctgtggtctggatttgatcttctacattctcatactccttgtgctatcaatttttttataaaattcctttcccctttacaacatttctgactgccagggacaccaggattggacttgtactagcttggtatagcacttggattagctgtaacttcttgcctgcagaagtgcttctgatggctgtgaaatatgcctttcctgtggactataaataaaaatgagcttcacacttcattaatgaatccttcctctcaatgtcccaagtggtccaaatgctaaagatacagtatttcacagcaggttgtgtaatcatttatgtaatatgccctttaagtaattgggttatggtcttgtgactaatgtaccctgatattcacgttgagaaaatggggagggtgttaaatactttaagaaaatgaagagctgtaagaattttgtgattcatgcaaataagattgactaatttgttctacaaatggaatgcctatgatttaattttgactgacaagtggttccaaactattaagaacataagtaatatataacagttgaactgtagtcctatgaaacatgtctkaaaattatttttattcatggttttaccttttggtaaattcctttrgtgatctttagatggttttctccaagtgtcatcagatgcatctccaatttaaagaaataatctctgtatcataatacctacactcttgtataaagagagctcaaaacaaattggcaaaggaagagtcacctaaggacactaggctgaccttcccctgggatcaattattgattactgtggagataaactgaaatgagattagctagtctgctgattctcatggaatttgcaatccaggttgagtgtctttcaaagcagaatgaagttgttaatcaggttggtagwatatttcctttgccatagatactctcaatcatgcttatatttggattttagggaaaaccatatctagtatttctttctmactttgctaccttcaccttctctgccctgtcttgccacttttgcctgttaaccaccaccaccatcatcctgtatgtcatagtttggatttctgtattgtgccaagtgctttrcctgcattgctatatacccttagaccagctcctgcaaggtgattgaaatgaggaaaatgagtttcaaagaggttaatgaacttgctcaagtttactcactaagtgataaaactcacatgggaactaggcctgaatgacttaaaayatatgctctggccccttcccactctgtctgtcttgctgtcttccctgtytctgtagtttctctactctttgttcacttttccctaaggtggcaggaagtgaaggacagatagcagtttccctattttcaacactaaaaataaacatgaaaattcaacaattggcaagtgagaaatcgtaagtaacttttaaakgggactaggaacatctaatattaacttctttttttaatctacagaattaaaggctttggaatgcaaaagagaaacctacaaaacctcagaatatagactataatctacattcagtagttccaagagaagaaaagtgtaacatctagctttctaacaagctctcaaggcacataatatctcttctttagatttgtattctgtaaagtacaagtccctaggccttttatcatacggaagagatttttctctgagattctctgtaaatacacaggttcaacttttgatacatctctgtgtatttcttaaaatcccagtagaaagccgtaaactcaggggctcaagaactctgtgaggacgataatgataatgaaaggcagatgttgcagcgtgactgaacagcatcccgatcgcctcctatgtgaactgtagaaaasgttgttgatgatccccttaatttgacatggcttttcacaaccatccataattgggttttggggtgttttttcttttatgacacaaacagatctttggaagaaataagaggtccttagataagaaatggtagaaatccgaggaagatccatggaagagataagttgctttttgctagtgggagatttgctggaggtggttggtctgtatggtcaagaaccacaagaacccttaggtggttgagtttattgaagtgtgtcatgtgattttctctatggaggtcaaggctggagaaggatctggaatagcataacctgtgaggactaaaaacataccctctaggccaggtggagagacttttggagtatagagtctccagtgctgtcctaaggaggcctgacctcctacagagtccttgtgtaccaaggagccaggcagccacacacttagcgatgccagcatatgttgttccccaaggaaggaaagtgcttcatttctgctaaaacccaatgtgtatagctaaaacctgttgttctgctaaaacctgatgggtacaaactgcaaaaaacaaaaaaacaacaaccttcttaagacagcatttcatagactcaccatgatagcaatcttgtttttgaggcagggcttacctacttcagatacaggtgtgtactaacatctggagggtttctctaattctgggctttatgaagccaacccaagggtcagctgagaatggtgggcccacactgtgtaataagacccatacagactctactctccttgaacagaaggaggcagtagagcatagaggttgaggacagaactgggagtgggattcattttgaatcccatgccatcactttaagtggtgtgtttgggatgtgacttttacagtctttctgtttttttcagttgtcccgtctgcaaaatgggaataataacacttatggtctattatagtcgttgtcaatgaggtaggtagagtgcttagtgtagcactgggcaccaccaacactgagtgcaaaagagagccagtagggctttgatttaaatttccagtttttccccattaagactttggacagcctgatgcctttgtcttcttttctggtcaggttctggtggctcctggcttctacagagccctcctgcatgtccatgtgctcctgttccactgtcttgagaacagccactggtttcagtgaccagcctccttttgaagtccctgccattgcaatgcctctgctgtcaaataccarttcattagcaattgttttccaggaggcagaatttttctttcatatgagccctccattctatgcctgtcttctttcctgtttcattgaggcaagggaaatagaattttatttatttataaaataaattgtattgtatatattcarggtataaaacatgttaagggatacatgtggatagtaaaaaggttactatagtgaagcaaattaatgtatccattatctcacatagttaccctttgtttttgtggtgagagcactcatttagcatgaatctcatatagagtacaattttattacctatgaccttcatgttgtacattagatctctagacttcttcattctacatacctgctattttgtatcctctgacatacatttcttcaytcccccaccctgaccccataaccactgttttgttctctatctctgattttttagattccacatgtgaggtcatgtgatttttttcccccgtgtctgccttatttcacttagccctctagtcccatccatgtcgtggcaagtagaatcttgttctttttaagactgaacaatattccattgtatatttgtaccacggtttcttaagccatctgtccattagctgacacttaggttgtttccctgtcttggctgttgggaataatgctgcaatgaacatgggagtgcagatgtctttacaaagtggtgattttatttcccttgggtatatgcccagaagagggattgttaggtcatatggtagctctatttttgatttctttagaaacctccatattcttttccataatggctataccagtctgcattcccatcaatagtgtatgagttccctttttccatacctttgcccacattggttgtcttctgactttttgataataaccattctaatgggtgtgaagtggtatatcatggtggttttgattttcatttctcttatgactaatggtattgagtatcttttcatctatctattggccatttttatgtcttctttggagaatgtctattgaggtctttttaaaattgagttatttgttttctactattaatatatgaattctttatacattttagatattaactccttatcagatatatagtttgcagtattttttttcccaatctataggctgtcatttcattttgttgattgttttctttgctgtacagaagctttttagtttgatgtagtctcatttatttttgtttttgtggcctgaccttttcatgtgatatccaaaaagtcatcaaggccaatgtccatgagctgttgctccttctcttctagaagttttatagtttctggtcttatgtttaggtcttttatttagagttgatttttgtgtgtggtgtaagataaaggtctgatttcattcttttmcatgtggaaatccagttttccctgcaccatttgttgaagactcacctttctccattgttttcccttggtgcccttgacaaaaattactatgctgtgtttgcattgtcatttgtcctaagttatttttaagttttccttttgctttcttctttgacccattggttgtttaggagcatgttatttaatttccacatattagtgaattttccaagattcttcctgttactgatttctagtttcataccactgtggcctgaaacaatactgtatatgagtacagtattcttaaatttgttaagattgtttcgtggcctaacatatggtctatcctggagaatgttctatgtgtgttgaagaaaaatgtgcatgtattatactgctgttggacagaaatttttgtctatgtctcctargcccatttggtcaaaagtgctattcaagtccagtatttccttattattttttttttttgcttcatctatctattgttgaaagtggggtattgaagtcccctatgatcattgtattgctatctatttccccgtgtccattatttgctttatgtatttaggtgctctggygtggggtgcatatatatttacaatagccatgtcctcttgatgaattgatcccttaaacttctttagtggaaaagttgctttctaattggtggattggattgggcagaagtagagatacctgaatcgactctgttgcacccatttaagagatattccttgtagaatatttcatgcctagtatggggaaggtcaaggcttctcaaactttatcatgtctacaaatcactggaggcatcttgttaaaatacagaatctgattcagtgggtctaaggtgggacctgagactctgtatcttcaacaagtttccagatgatgctggttcaatggcaaggggatgggccacattaatgtgttgaagagttgagttcgaagatgggcaatagtagataggttatcttttcaaacaacaaagcttaccgtgctcttctatactaatttttatttatttaactcattttaaagctgcatttgaggcatcaataattttacaaagctctaatattctttctctgggtaaacaacataaaaaacatggtaaagtcttgacatataagtgtaaaaggattcaggcattatagatgaaaggagaaaacagcaaaattgggttgcattagttacattggttaattctgaaaagcttctaaaaagaggtgttttgaacccagcttgaaagatatggcaaatgtggattagaggatattagaaatatactaagttagtatacttgtacagggcagaaggtggaattaagccttagggacagctgaagcaaggtgagtggggggataggagggaatttgcccaaagcagagaccaagagaaaactgcagcttwttagtagttagcagagaagtacccagccaagcttgcagagagcattacgaaagggtttaacaatatgtattaggaaacaaggtcctttaaggtaaacttgagcttcccactctctatcagtggggcctgtcagaggaccctcatccacagcagtaggaagcatttttactttctgtactttggccggaacatgtttactttcagctttgcttggtttggtggtggggttcagacttcttgggaaacattgattagctctctgaggcttyctgtggctgcccaactttcattcattggaccattcttttgtaaattcaatattgttgaatctagtgcctctatgtctactgaacctcatgctaaaggtgtgataattgcatatttgcagttaaatagcaayagcaataatagcacacacaaatataccatctaacttacggagagatgctttcctaatgcctaccaaagagcttcctacgctgtgagtagacagtggttttaggtgattagtttctgttccccttttatttccctaagcaaccccctttttaagttggagatcctttctttgagttgaagaggtgacaggggtcatcttttaggtcatggaagatcctctcaagaggtatgggactgcagaggtgaggtggtgtacagagttactgtaagatgaatgactaccaaattttaatgagatttttgagtaagtggaggtaaacagagggatgtttgtgaaggggaggggattagtagccttagctgtgtcctactagagctgatactcatcttttgtgaaatatctggataactgaactaaaatattctgttttgatcttgcagattaaaacaggaatttcaagaccatatgtcctggttctcatattcttcagaattctcagttgggaaaaaacacttacatgtccaaaacttggaatttgttgtctctgagttttcctgggtttgtccctgggtttcccttgtttccctgttcctctatctcctggagccatgagaccccyrcactgttttttctgaggctcacttttgccgtggagagcagttgtgagtctcttcaagccatagctctgggaaccacagttttcagaaattgcyatgcaagggaccatagaatgccacaagtatctcctacactctcttcagcgacagagtgcccctgatgtaggctgtatttccttagggtctgcatgccttttctgaatgattctgaaggggaaaatataacagagaggctggctaccctatgagacctatctatattacacttaaaaaacaaagcagagtagattaaaaaatagatcagtaactttttaaacttcaaatctgacttactaaatacacagagtatttgtctcctggacatgctgtctcaatactggctgtggctcatcttagtatcctctcagggccccagagaggcccagagcatcctctaccaccagattgctcccattttgccatagcccactttgcaccagagaccaaaaaaagtgtttctcaaggtgaatttatcttacagatactgcttttttaaaagtagggttgccagataaaatgatgccaattaaacttgaatttcagataaacagtgaataatcttttattgtaagtatgttgcatgcaatatagaaaacaaaagacaaacttatttgygtttttgttctgttttgctaaatccagtaatcctcagagcagggtttgttcygttttcttgttaattcactgactaaatatcctgggcatcattttcagcattattatgccactctgcttcaaagtgttgaatggcccatatttattttcaaaaataaatgaattatatctaattttgctttgagaaattaataatgccatttgacacaattagctacccctagtgtattacaaaatcagagacaggtattacagatgttcagtaatatgaaaagttgatgttatggaattgggttgctaagcttgacaaaattgttaatttggatttaacagcgaagcatgaatctttaattgtagaaagacattaaatactttagtatactgtgctttttcacaagacatatagaagttccttgaaacaattattatacaattatgctatcacttgcttcctacataataaagagaatgtggttcataactctgaggaacttgaaaaacttatttgcgaatgacattatgactatgtaagtacataaaagggaaatgtttctgatcgtgattagtttgggcttaccatgtttgcaagaagagatatttaactagaatcagatttaacaattttcatcaggctgtttacagttgagaaattaattaaaatgtcatctgtttaattactatttgttatccttaattaaaatgttaattgagtacatttgtgtgtgcacaatacttaatatgttgactttttgacaaaagccatgacaatgtcttctaccttttatgttcaaatgtttgtcgacttaatgcaaatattttggggaaaagatgcatatattaaagaaacataagagcatagtttgaaagatcatttttttctgctagaactgtgtagataaccgatctgtaggaaattagcactttaaccgcagaaaggaaatctaccagagagtgcattttagtcttgtatttgcatatgagaaagaaggacagaaattaatcagctgtaaaatgtccayccagaatgacatttctaagtaaagaaattgattatggggagatgcactttaaacatgttcttgcctcactgacagtgagaacagactaaaagataatgaaaacctttatattcttttatattgatgtatacttgaccttttcatttgagcaacatttgaaatagttgtttaaaacaacatatagaactatgctgaaaaattggtttggattttcttttaacaatggtcatgatttttctttttcatgcaaacctgtggcattgacctctttttagtaaataaacatatgctgattgtgttttgaaaagcaatgatatctcatagatcagtataaaagcaaaatggttccttttcaaataatttatgaagggtagtgctttcccaaaacagcactggttagcaatagcatccagtgtgccctaccagcaacacaagtcgtgggggattgaaaagacagatgatggaatagacatagctctttgctcctactgagcttcaagtttaaagaacttattcttttctttttcttcttgataaactttatgactttaatgtctagtggaatgagatgagccagtgctgcttaagaagtaataataagcataacaaatatgtagttttatttagtgcccacactgttccaagtatatgccttttaatcctcaaaacaatcctgtatctgctatcattattcccattttgcagatgaggaaatgaggcacagacttctcaaggccacatagcaaataagcagtgaggctgggagttgaggcgaaatattctggacagaatctgtcctcttattctcctactctacttatgggtattgaaaaggttttgtgcaagagatatcaaaatatttttagcactcacacatttatacctattgcagcaaagagaagaaaaagtgcttgtgttaactcttcagttctaaacttaatggtttatagtgttttaatgaccattaaatattaaagaatgattaaaagcaaacaaggggaagcataggcctgtaaaataagttttctgagaataatttttaatttttttccatatataataagcctttgcccttaatgtggataccatcagtaattttgtggagctacatggcctttgttaaaattttagctctgccacttagccaaatgatcatgggcaaattttttaacctctgtaagctttagtatcttcttttacaaaatgcagataatgatttctccctcacagggtcgtcatgaagattaaaggtaaagcacatagcctgcaatgatgggcttatgcttatactagacacccctaaatgtgagctacagctgctacaaattaaataagcaagttattttgagaggtatcacactggatattagttaatacttattaggatatctctgaagagatttagtaacaacagaggtagatgtgtagtttaactggcttaagacaataggctrtcacaatttcaatggtttgcccattattggaagtgactatttattaaggataaaatgaatcctctccatctgttacactactaggaaatatccaccaagagctcattcgtttgctgttttccttcccttccaacaggcttacctattagaactgtaggaaaaaggcaaaattaaaggggaagatgcaaaacagagcaaagagagcttggcttcaggaagccatgcttaatcttaaagaccagcttgaaagggagaaggggaatgacttggactgtccctttcacttcacccctctagggttttccactgtggaaggatgattattggttggttctctcctyggagtggtggaaagatgcatggggcatctccttactctcaacagtggctttcaaatggttatttattttttttaaatcatgacttacactaataaatatatttttctctgctgtctgttctactaaacatcataaatgcagggatttttatctgttgtcgctaatgtatccaagtgtctagagaagtacttggcacatggtaaatgctcaataaatagttgttgaatcaatctgtctcgctgtccatccgtccatctgtccgtccatccatcccatccatccatccaatccatccatccatctatccatgcatctatcaagcctattaatcatctatcatatatctatcaatttatctggaaaaatatttcatcaaacattcttatgcttactatttgcttacagtgcattctcaaatattcataaaaagaaaaaaatttctgaattaatttgagtacatttattgagggagagaaccttaataggtcattctttgcaatactcagggttatgatctgcaatttgaaaagcactacttgtcactgggagaaattggctttgtgtgtaaactggcttgtgtcgttgggacttctctttcttgctgtcacagtgcctcatttagcttgtgtatttccccagtccatgcactagcttgtgcactcatattaccataaccaactgcatgctagtaaaataagtcaattagtataagctgggtrtggtggcttaygcttgtaatcccaggactttgggaggctgaggtgagaggatcacttgaagccaggagtttgagaccaggctggatgacaaagtgagaccccatctctacaaaatttttaaaaaaatattaggtgtgcatggtggtgcatacctataacttgggaggctgaggcaggaggattgcttgagcctgggaagtccaggttgtagtgagctatgatcacaccactgtactccaggctgagtgacagaccaagacccggtctcttaaaaaaaaacaaaaacaaaaacagacaagtcaactagtattaagagttcttgaccagcttctgggaagctctgaaagcatttgctgcactccagtgggtcctatttttgtgaagccccaggctaatggttaattattgggtattgccatagtctagtcttggtctgtgcctgagctggtttggatgtagatctccataaaggcagaggattgcaaacagtaacctgttataaagttctctccacaatgagcatatttcttctccatacrgatgctgaaattaaattattaatggattttaacacttttacattctttttatttttatttttgaggtatctgtacctaaattttatgctcactgtakctatgaagaaggaaggagatgaggtagagaaattgatgcaattaagtgttttgataggtgtgacaactgtgaaagtctttcatttcctgagaaaatatgtgagagtaaaaaggataatgtattcaaatgttaggttcattgtgaagtaggactggggatcctgtttctgtacattttctaatcctcaacaattttttggattatctgactagataaagcaatattytggcttaagtcttgagtaaaattaaggtaaactatctagaagaattaattgaacatgaattctagcatctactcaggtctgagtgccatagcttcgccagggtatctagaatgtcatgagccaagatctggacctggaaacccctcagttgtgtgggtgggatgggcactagggaggggttaggtttaaagaaagagaccagcaggctaaggatgagagccgcagggttggtgagaaggcagctggtagtggcctaatatggccattggcaccatataggtgcagcaaggtctaatgagcaagggttgacagattgtggaagctcagtgatggtcacctccaaagaaggtaatatttggaattccaagggccagacaaaataacattgagttaacattgctgtcagcatgcagacagtcacaaattctgagttgggactggtaagaataattcagggtcctaatcctagaggatcatacagcatgagaccaatgatgaaagtgtagggaaaaaaacacaacttacattatcaacatggagtgataaatggagactttgtctgcagctcaaggcacatgcctggctttcaaaagtgagtcacaaggatgggtttaatgacaaacagcaggagtaacttgacactgactaccagaatatgaggatcgtattcctccttgccaaatcaagatcagttcttgagagacaaaattggaggtgaccctaaagctgggtggcgttcaagggccccaggtgttcagaaaaggaaatggagagatggaaatcagtcagggccctggaagtgggcccctcatactccacccaagggcatttgaagtacaggtaacagcaccagaatgagaagggcagagcacttgaagttagacagaataagtcagaatcactgaggctgatagtaacctggggtgtgaaatatcttttaaatagttacattgtagtgkagaaatattatatttgcctttcaagaccattgataggggacaattgagaaaatagaacagtgtttctcaactggaagagatttgctgtctcagggacatttggcaatgtctggagacattttttggttgtcacaagtgtgggattggggacagggtttgctactgtctaatgaatagagaccagggatgccactaaacctcttaaaatgcacaggatggcccttcacatcaaagaattaaccagtctaagatgtcaatagtgctgagattgagaaaagctgaaatagattaagattaccactccatagtcttgattgaatattgaatttatatgagcaatgcaatatatttctgggtgcacataaattagttttgactttgttgttggcaaaacwtgactkgactagagagtaaatagcctaggcatatgctgccctggagatgcagagcaacccagccagcaagcatagtggggctgccctggaaaacattgatccatgggcctgtgagggaacctgtgcttctagcatgagtggcacattgtcrccagttgtgacctagcttccatgggwttctgtgtaatgtttactatgtttactagggatcacatggcctttccagctactctttttcactctgtataacttcygatagaaagagcttaaagttaaggacttgtgtatttctttttttccatgaatttctgcctactgcccagtcttggtctactctaacacaggctttccatgagctacagagatttagtgcagataaaggaaaacaatcgtaatgatgtacttgcagtggagggtgctgatgagagattgatgattatcttgaggaggtttgatgactttaaaaaaagcaactgattccaaagctgaaacttaaagtctttgctctggggtaagtgaatattgcttgaagaatatatgccagttactttttaaataatagatctacttagacttgattatgaggcagtttgctcactgctcttttctttctgagatttttgctttcatggctccatttttcaagatggtaccacactaatgtgactactatgaggtactgtgactgtcatagtttgcctcaaggttggatgtgctcaggttacattttgttatctcttttctgtggtaagaagaacatgaggccctcaataggtatgtgaggtgttccagatactgtcacacttaatgtacaaagtgcagtgtcttggttcatgggagaagtttctggataacttacagtcatgaaactatgagaacacattgttctttccactgtccacccaatctaagctgatgggctggaagtcagcacgacaaagtagttagaatttgtgggctcagaggtcagacacacttaagttggagttscacctctgccacttattattatagaagaccttgggcatgtcgcatatatctgtctgcttatggtttcttatctgtgaaatgaggaatattgttgtgaggattaaataatatatgtggctcatttgacagagtgccagtgttagtaaggacagaaaaaatgtttttgttattatcactgttgttgttaattgcattggactctgttttctttgttctgattttcgtcttgtttaagatagagagggtgagctgaaagttggatttcaggtaggttgtgcttttgggtactcttcagtgcttttcgtcactaaagagagttgttttatctcttttctttgggtttttccttaagttgccttggcatatgtgtgtatgtgtgtgttacaatttttaaaatttatagtgatgcaggtcaaattccaggagacaaatgctttattaacccaaatactagttataatgaaatggaaatgttgtgatcccattaaacctcaagtcattcagatcctggccctgggatcactcagatgacaggaaccctcagcttgtttacccaaatgagaagccatgaagaaaatctgcctgcctaggctgcatattctccaagtgaagggctggagcagtatttcttgtatgaggatcatttggagtgcttatgaaaatacaggtttctggaccctgtgtggggaatggaaaggttctgcagattctaactgatttgattatctaagagatgatgtgtatagggaatattcgagcctctgggtatactggcccaattatatgaaattaacaaaaaaaaattttaaaagaatgcaatgggtggggaggaggattcgattacatgattttcttgtttggaagaggtagattgaagcaagggctttgcagctctgcactgaaccgttaagggctgtggaacctctcttgtgctatctgttttcaacattctttgtgaagagggaattgcaggtgctgcttgtatacttttgattgggattggagaaccagtttagagaagagagagggagaaagtaaatatctgatttgtggcaaacaggctgctgtaatcttgacaagttgttaaaaaattagaatctcatttttaaaaggaaaggagcttaagcaattagtacaaactctaaattgaaactttcctatgggtttagagtcaggtaaaaaatattttaatttctttactttttcacaaaggacagtaaatgaagaagattgcctctaggcaaaactgttatttaactttttacccagaaatattattgcattttgaatcaaacaagaaattcacctagtattcaggattcatagttctgtttttatttttttttaatagcaaagcaaattaaattttggaaagggacccagacaaacccaaagatggcaaaacaatggaagaattttaaattttaagtagaaaaacaacagctcattatcatagccaagtaacctacgtaagtttaaagaaggagaaaatttaataggttaagaatgaacactcttcattttatgtttgatttacttgataaaatctattcacatacaggaggagccaactgcaattaccaaatataagtagcagtttattagtttctattatatgctatgtgttgtgttagatcttgggattacagaattggatatgacatagttcctgtctgtaatggcccataatgtagtgaggtggtgagaacatgagcagatagtgcctatacaacttagaggtatccacattactaggcatttattgctccagtttgcaaagtgcctactctctggcattgtgctaatgacctgactatatggaatgtgtgtgtgtgtgtgtgtatgtgtatgtttatgcatgtgtatgtgtataaactccaactcctagaacagtcctgcttttatcttcattttatagatgagataatcaaggcttacatagattaagtcatccaagatcacatagctggtttttaacagaattcagatttgaacttggaggtctgaatgaccgtaaaacctatgccctttgcaggacaatgtgacttttatcctgtgatttaattcttatatacattctttcaagctaatatgcaattattcttttttttcagaaatatatgtaaatatccttagattgaaagtcttttagaaattkcctatatctgatggggaattttctcaggagtggaatatttaaaaagagagcttgagctcttagcaatctggagcccttctgcttggtacacattcctctcagaaaaagaagtgtaagtgtccaaaacatcctcaaatgctgacacatcctccttgttaagtgaacaataaatttactctttgtagagacgtctattgcctgtgtacatacatgtttatagaaatagtgagttgagtctcaaagtacagcacagatgctgacatgtttttccagtgctgggtaagtttgtagctgagcttcggtaccaggatttgaaagatctgaataaaaaaatatatcccttcagtggaaagagagaagtctctgatctgtcacaacctactaaatttatgttttaaatatcttcacattttatgttataaaagttctgctggcttgtgctttataacacacagttgaatggtactattatggatactagcttccttccaggaggtagaatgaatacaacataatccattctgccataacgtgagctattagaagtgatgcttctggctattaggggtaaatcatatctgtggaatgaattaagagttagactattcgcagtgtattggatttgcctgtttcacaactgcattcattaagttcaaatttgatgagagctgttcatattaaatttgataaccccaattctagcaagttacacatattataaagctcctttgaaaattctrtgacattcatgttatttttgtcctttaataactaagccatttttaaattaggtgcccatatgtagccatgtgttagtgaaagtgcttcataattgatgacttttattgaattagttcagaattcagtgctcttgtctgattttatcttaatgctttggtattgaagaatctaagattactgaataatttcagtctttcaattgaatttgatgaacttctgtgggactcctacaatatccagagcattgtgcaagatgtagttggtttgaagaggaaaaataattctcaatttttagaaattactatctaatgaaataataatagttaagatctatttgccagaaatcaacaacctccttggagcaaaccaaatggagaaaatgacctatcttatcatatttaaatttttcttaggaataagaaaaacgattgtaggcgaatgtaaatataatctctctgcccaattgcatgtaacagtttcatgcccggtttatgaaaaaaattactcattaattcttaagctgtttttttttttttttttttttttgagacggagtctcgctctgtcgcccaggctggagtgcagtggcgcgatctcattaattcttaagctgtcaactctgactttctaactagcctcttctcacctattcccatccttaactacagaacaatgttaaatctggagggaaggkggggaaagatcagttggaattagtaaaatgtctttattataaatattttaaattgtagttctattattttcaaatatctataatagctcaaacaccacctaaaattttgaacatttttggttagatttctgtacacctgctttagtgaatagtgaaaaaaagatttataattagttttacacaaagctcagatttatttatatggaaatgggcattcttagatttcacaaaatagtttcttttgaatgggttaaatattttttttcctgaaaatgttttcatcatatgaatttactgagtaaacttcctttttgaatggatgataraaacataaaccctgactcagcccaaatcttctctaattccaaattagtaaagtctaaatcattgatctaaaaaaaagacaggtagtcatatttttatgattagaattatttaacacatcattttttagcaatgatgtgttaaacataaaaatctttttgcctattatattttcatcatgttaaatttctgttattcatgtgtttaatacatttttaaaawttgtttatgaagtttgcagaaatgttagctgttttaaaggtctttgtgaaagttgcagacttatgttcagagctcaggaggaagctaggtgaaattttgatagacttttcacttagctaaaatgttttttatgtccagaagatgtatgtcttgcctacattttatgttaagatcttaactttttttgtatataagaaaatgcctatcagttaacagaccaggaaatatgtgagcactgctctgatatttataatgttttaaaatattatggtagcaagatgaacaatgttgcattttaattttaattttttctctttaaaatttgttttgcctttcctacaattcaaattctattaatattttgaccatctttacaattgatatcaaaatgttttagttcatgcttcaaataatcccatttggttctcacactttctttgttgaatcattgcagattttaaggtaaatcaggcccattggaattcatgtaacagtgatttaacaagtcaaggtgatatttcatggaggtgagatctgtaacaagatgtgactgtttaaattgatctttgaagtgttgaacaactttactgcagcatagtagatattttctcaccttttctttagtaatttttgccattttttcttaacgaaggaaactttctgagcacaaatgtacttagcaacaagttcttgatttgcccggaagttaaatcttaatagagtgcctgatagagtatatgataataacatgaaattataatcatagcagctaatgcctagtcagtacttttatgtactaggctctgtatcaaatgctttacatgtattatttagtctcatagttaggcctactttttggaaagaggaagctaagggataaacctatgaggatgaatggagataataccgaactcacagagataaaatgcggtggaagtagtgtacacacccagaatttgcctggatgccaaagttcatgtgcttaatgagtgcatctgtctcaataaatatacttttcttggcagctagaactgccaagaaatacacttttcctttagtcagctagaacttttaggaagataacactttttgactactttgtcattcagtagcatacacattatagagaattaagaaagaaaaaaacccaagaagggtgaaaaaatgccagtttatcttgtttgtatttattaatttttttttttttttttttttggagagggagtcttgctctgtcgcccaggctggagtgcagtggcgcgatctcggctcactgcaagctccgcctcccgggttcgtgccattctcctgcctcagcctcccgagtagctgagattacaggcgcctgccaccatgcctgactaattttttgtatgtttagtagagacggggtttcactgcgttagccaggatggtctcgatctcctcgtgattcgcctgcctcggcatcccaaagtgctgggattttgtttgctyttttagagacagggttgtggttttttttgagacagactctcactgtgttgcccaggctggtgtgcaatggcgtgacctcagctcactgcaacctctgcctcccaggttcaagcgattctcctgcctcagcctcctgagtagctgggattacaggcacccgccaccatgcccggctaatttttgtatttttagtagagatggggtttcaccatgttggtcagactggtctcaaactcctgacctcatgatctgcccaccttggccttccaaagtgctgggattacaggcgtgagccaccgcgcttggcccgagacagggtcttatgctgcccaggctggtctgcagtgcctctgaacaggcacaattatagtttgcactactggctttgaacttttggatacaagcaatccttctgcttcctgagtagctgggactataggcatgtgccactgtgcccagcttgttatctgctttttaaaacgttggtagagatttatgggactaattaaattcttgaaacatcccagctattactctaccaagggctttacttggggaatgtgggtctggggactgatcatgctatgtgccctgcttttgccagtgaacatctaggactcctcttgtccgttcatccactctagccacagaagcatgtcctagagtgcccagaccctttcatttcttggcataattacatcagctcttcccctgcttggaaacctcttcctcaggtacttgcgaggccaggaaggcaaggctccctcctgtccttcaaatctcagcttaaatgccatgttctcagaaagtgcctatctgacccttcaaataaagtgagattcctcctcactttcatctctcccacacactatttccagtgtaccgctttcattagctyctgtcaatttgttgtctgtatcacctactagatcctaagcttcttgaactatgtctgttttattgtgtctctagcactgagcagaayggcatgtgacagatactcagtaaatatttgagaaatgaatgaatgaaagaccggatgacttggaaagcttggaaaaggagaagaaataattaaaaggaacaaaatgcaataaaagtaactttctcattatagcctaagcaaaggaattgggatgagtagcagcaagcgagaggggaaagcattttctgttagcgtgtgaatctcaaatttgtccgacaactttgaaagtgaacaagggtgtcccaacttcatcttctgagaaacagctgtgtccctgttaactttattttttctaacaaagcaagaccctgattccaaatccaggcctcagatttgctgtatcccagagaaggctgattgtagcttgccatagataatgaagactggtctgtggtgcataatgkattatagtttgtccctatttattatttttttccttaagactgccgaattcaaaataaatgacatgttttaaatggctactctttattttgaaaaatgttattagagttataaattaagttcatgctgttcagattactcttgcatttaagagttcagagctgtataggtttagggaagaaaacataattaagcataaataacagattccaggaaacaaaggataaaagaggaaatgttaaattataagagtaatatagcaagaaataatagacatgcagcaagtctcccaccacaaaattatggtagatgggttcagtcaattctgtctttaaagcctggttgaaaaaaaacacagaaatgaaaattatggaaaattgatttcctaaaaatatgtaagtcatattatcattttaataaaataagaaaattaggaacttgggactgtgagataccttaaaccagtgtccccacaggcagagaagaattgagaaggtggtacaaggaagccctcgttatctgacagtccctggccctggaatatggcacttacatgtgattctacttagaatgggaataaacttttccagataaatagtttaaaaaattgattgaggctttatatcaaaaatcaaaacaaaattatgaaaccactttcctctgaaaactttgttgtctgtcccttggtctaatcatcccaaaggtcatatgtccatgattttgcacatgattctggcaagttttcaatgctgcttccagtgactttctataactctggatcttttataagatctccaatttcattttgtagttgttttgcattttacttttggctattgtaagcaatcaacaagaagttgattaaaaaattttgcctggaacaaaagtgaaggttgggagggagcctgtttcagaggtcagtggcttagtgaatattttcatttatgacaacttgcttctccatgcaactcctgcactaaggtttcttgggcaacacatgctcagacaattaagaactcttgtaattctgctcccaaacaaaaacctttttgtattagtctgttatcacactgctacaaaattattacctgagactgggtaatctataaagaaaggtttaattgactcacagttctgcatggctgtaaaggcctcaggaaacttacaatcatggcagaaggtgaagggaaagcaaggagtgtcttacatggcagcaggagaaagccatcagatctcatgagaactctctcactatcataaaaacagcatgtgggaaactgcccccatgatcccatcaccttccaccaggtccctccctcactcttggggattataatgccagatgaaatttgggtgggcacacagagctaaaccatataattccacccctggctcctcccaaatctcatgcctttttcacatttcaaaaccaatcatcccagaaatttcttctgccagatacactaaatcatgtttctcaagttcaaagttccacatatctctagggcgggggcaaaatgccgccagtctcttttcaaaagcataacatgagtgacctgtactccagttctcaataagttccttatttccatctgagaccacctcagcctggacttcattgtccatatcactatcagcatttttgtcaaaaccattaaacaaatctataggaagttctaaacattcttctgtctcctgagccctccaaactgttccaacctctgcctgttacccagatccaaagtcacttccacattttcaggttatttttatagcagtaccccactccctgtaccaattatccgtattagtctgttctcatgctgctataaaaatactacctgagactgggtaatttataaagaaaaggtttaattgactcacagttccacatggctgagacctcaggaaacttacagtcatgatgcttctatgattgggaggggaaggaaggcatgtcatacatggcagcaggagacagagcaggggaacctgccacttttaaaccattagatctcatgagaactctctatcatgagaacagcatgtgggaaactgaccccatgattcaatcacctcccaccaggttcctccctcacacatgggaattacaatctcagatgagatttgggtggggacatagagccaaaccatatcgttcttcctgacctgccacaaattctattactgagaaatgactcagagattgaatagcttcaaaattatcttgattggctgcaacagcggtccaaattcagaaaattattgtttgacccatgtattagttttctaggacaaactagaaagagtaaagaatctctactgtgactttggctgaagggaaaataactacattcacgattgggctgccaaggtcagtcttttggattgatttttctcattggtttagctttccatggtctgggaattaaatcccctactgtgtgtaatttacacttattgagaagggcgtatcatggcaagctgttctgtgtcatgtctagatgaggatgaaaaatgaaatttttagcagttttgcacaagtgtttgggaatttgattttggctattttgaatatttaacttacatgagtacatgtatattttcagtatataataaagtgatgattaaaattatactaacaagaagtttggttttatgtccaacagtttagtttctcaaagatgctgagtacttttgccttgatttggggaaagcagttcaaaggaaataaatatcttttcataaattaaggctattagctaatagcttcagcaaggaatggtaaataaaagtgttcagtcttgtttatacctcaactgaaaggctaataattttctggtttatacctttgattctatagatttattaaaaatgttaggatatgaatgttgactttagccgggttcctgctatgaaattcacgatgcatgaaattttgacatacttatagacattcctacatatcatttattcgtaggaagaaataattccaatttatcaggttggatatggtgaataaggagtcattatgaagtcatatgattaatattgataatgcagttgccataggaccttaattcatgtggttttgttttttgtcctgtcagttttcttccctgttgtaatcagatattagctattgttcagttgtttgctgggccttctgctgtggcagctgccatccaaaagctgactggagaagaacaaattcagaaggtagatataaaggaagcagtgaatatgacagggaacatttttttccctgcttattcctagggaaactatatagtatcacagaaagaatgtggtctttggaatctgacagattctggcttaaaccttaccgttattcattagctgtttgtaagcaaaggaccctaactttcaagtctcagttttcttacctataaagtagagataatgatatctgctttataagatagttgcaaaagttatagtatacataaaagtgcttggaaagtttacaataattagtattacaataattactaccattgaagggatctttcagataaagacagatgactttggtaagagtgagtggtaaacctggtacttggtgggcaggtttcctagtggatagctgccaggctgtatggaaacagtggtataaataaaatgactcagcttgatggtcttggcatgagacttaaccttccagtaactccactgacatcagagtagtatgatcctcaaaactagatgattatcaggatagttggagaaagtgcttggtgtcatcctcaaactgaattagaatctccatatgaggttaataaatctgatttttaaaaagccacccaggtaattctgatactcagctttggaaaccacttcttaagattcaaacccagatttttcaaaccaactttgagcatcattgggtgagtagctacacattatttttaagaccctttatcttttatatttttgagaaatgcaaatagaatggaaaatagattggaaggccatgagagtgcctgctgagatgtcacaagagatgtgagtaagagctaatggggcataggcctaaaggtgccagtggagataagatatgtcaagacgccgagatattttgaaggtaaacagaatatagtgattgcatgaacatgagtgttgaaggatatggaagtaagaaaacattataccaagatttcaaataacttaaggaggacttgtttttgaagggtgtgtgctggggtggaaggagagaccaggcattgattatttaaaaaaatctttattaaataataacttacatataataatatgcacctagtgtaaatgagtatttgatgagttttgacaaatatataaacctgtatatcacagtcacaatcaagatatagcatttttccgtcacctaaaaactttccttgtgccatttacagtcctcttaccctgctctggccccaggaaatcactgatctattttctcactgtaggttagatttgtgttttctggaatttcaataaatagaatcacattgtatgtaatcttttgggattggcttttattgctcagtataatagttttgagattcattcatattactgtgttcatcagtaatttattttgattgccaagttgtattttattttattgctacaccacagtttgtttattcagtcacctattgatggatatttaggttgttttcaattttgggctactgtgaataaaattgtagtgaacatttgagtacaagtctttgtatgaacatatgtttttatatctcttgggtaagtatacctagtagtagaattgctggattatgtggtagatgcatatatttatattttataagtgtacatacatatgtacatatgtgagtgtgtgtataccccccacacacataagggatatatatatctgccaaattatttcaaaagtggttgtagcaatttgcattctcaactgcaatgtaggagagtttaagttgcttcacatcattgccctacttsgtattgtcagtttctacctttaggaattctagtaagtatgtagttatatctcattgattttaattttaatttccctgaagagtaatatgatttagcatctttttatttatccatttgtatatcttctcttctgaatttctgttcaagttttttacccattttaaaatttggactgtttgtattgttatgagttgtaagagttctttaaaaattcttggtaaaagtctttaatcagatatagcccccaagtattttctcctcaatctgtgatttgacttatattttattaataatgatatgtgaagaggtttcttattttggtgaattccaatttgttaatttactttatgaactgtgctttttgtgtcttttctaaacatctttacctcaattttgtgaaaattttcacttaagtttttctaatagttttattagtagtattatttaaatacatttaaggagtacaagtgcaattttgttacatggacatattatatagtggtgaagtcttggcttttagtgtatccatcacctgaataatgttcattgtacccattaactaatttttcatcacccaccccatttctcttcccaacccttctgagggtactagacctaccattctatactctgtgtgtacacattatttaactcccacttataagtgggagcgtcggatacttgactttctgtttctgagtaatttcacttaagacaatggcctgcagctccattcatgttgctgcaaaagacatgcttcattatttttacggctgaatggtattctgttgtccatatataccccatttcttttatccagtcatccactgatggacacttaagttgaatccatatctttagcaaagattatgaatagtgctatgataaacatatgagtacaggtatctttttgatatagttatttcttttcctttgggtagatacccggtagtgggattgttggatcaaatgatagttctacttttaattctttgagaaatctctttactgttttccatagagattgtaaaaatttacatttctaccaacagtataaagcattcccttttctccgcatcctcaccaacatctgttgttttttgactttttaatagtaatggttctgactagtgtaagatgatatcttattgaggttttaatgtgcatttctctgatgattagtgatgtaaagtattttttcaaatgtctgktggcccyttgkatatcttcttttgaaaaccgtcttttgctcactttttaawagtwatttgtgtgtgtgtgtgtgtgtgtgtgtgtgtgtgtgtttagttgtttgagttccttataaattctggatattggtcccctgatggatgcatagttttccaatattttctctaattatgcaggttatctgttcactctgttatttcttttgctgtgttaaggttttttagtttaattaagtactcatttatctagttttgttttggtttcttgtgcttctgaggtcttagtcatgaattcattgtctagaagagttttgtcctgaagagwtttccctagattttcttctagtatttttgtatccttgcgtgtactgctgtatagttttattatttgtgtttgggtcagttgtccactttgactaatttttatgcatggtatgagaatcaagtgtcttttttcttcatatggttattcagttctagcaccatttgttgagaagttatcctttcccctttgaattttcttggcatctttatagccatttctaaactcttcacttttttccattaatctctatatctagctttatgccaatctttgctttgttgattactgtagttttatagtttgtttagaaaacatttaatgaattcttcaaatttgctcttattctttaaaattattgtagctattgtaaattctttgcatttccatacaaattttagaatcagcttgctaatttccagtgaaatggacagtcttgtgtcttgcagactcttaggggaaaagcattgagcctttcaccactaggtatgattttagatgtattttttcaacagatgtccattatcacgttgagggtatttctgtatagtcttaataagctgagactttacttatttgtttatttatctattttgtgaatggatgttaaattttttcaaatgctttttctacaccaattatggttttgtatttataccgttaatatggtgaattgattacattccttgtcattgtttatttaattttttatatactcctaaggttgatttcccaatattttgttaaagggtaggggctacatctggttccagttatttcgttttggccagaagcgcaagtctgtgcaatcagttctgatcatgttgaatttaaggtaaatttaaaatttctaaatggaggttcattatccaattggtagtaggtttgcattttagagaagtctgagttgactatttcagagataaatttgggcattgtagttatactgacagtgatcaaagtcataaacttgttggacattgtcatcttgtgagaatgaaagggtgcaaaaatattggggctcaggtcaggcctcagggaacctcacttttaaattgtaagcaaataaagatgaactagaggagatgacaaagaaggaatatctagaggggtaggagaaaaccaagagagcgtgttgtagaagccaaggaaaatattgtccagattttaaagttgctgattcaagtgaaatgaggacagcaaattgagcattggattttgtgacatgaaaagttttatgatcttgcttagagcagtttgaatacagccctgggacaaaagccggtctcaatgctgaaaagtgagtgggaggtaagacaatggagagggtacttagttgaaattttaaagtttggttgtaaaaggtagacaaatattagcttgagagctggagttggatgaggagttgagtaatggtttattttcttttttgaaaatgttttctttttgaattggagaggcttgagtatacacaaatgccagtagaaaggacccagttgaaagtatgtggttaatgacttgaaagaragaggcaataatctacagtgtcaagctcaaaaaggctgctgcatgtgcaattcagagcagagttgaggcttcactttagatagcaaaggtgacattttttcttgtaacgaaaggaaagggaaaggaagaaggaagggaaggtttgtcatgtgatgatgtgaaattaagaggtatctttaactgatggcttctatttcttatggggaagaaaaagatacattctacaaaatatttgaaaaatatttgacccatattgaaacagatctgaggaatttttgaagaaaatttggtaatgttttattagaaaccatgggcagaataataaagttgtcttagttcattttgtatggctataaaggaatacctgaggctaagaataatttatgaagaaaaaaggtttatttggctcagttctgatggctggaaagtttaagattgggcatctgcatctgatgagggcctgaggctgcctccactcatggctgaaggcagaaagggagctagagtgtgcagaggtcacacacagagaggaaatgtgagacagagggaaggtgccaggctcttttaaataactagctattgagggaactaacagagtgagaactcactcccccaaccttgtaagggcattagcgtattcaggaaggattccccccaggacccaaacaccgsccattatgccccacctccaacactggggatgaaatttcaacgtgaggtttggaggggacaaacattcaaaccgtagcagttgtataggcacagacatgtttgattgtgacatctggctgattactagttttgaagggactcagtagccctggcgactattatatggatgaaatgagacaccctaaaccaaggctatgccagtccagaatgatgatttacagatgattaattcaatagtagccacttagcagggatggaaggctggagggaaaacagtgacttctttgcttattccatctcctgctacaggggattaaaagtctttcttttcctctttcccatcttcttctcctgttcctgaagttcaacgttgactcaagccacactgccttctccactcatccccttacccttagtccctagtcttctctaatgctggtttctcaaccagtatatttaatctaccccctactcttctcagtccctctcccaaaaagtcttttggtgacgtgttgaattttttttatctcagtatttccattttcttttcaagtgtttttcatcctgcattttttgagctaccttgaattctacttgttgtcctactttctatttatttgtttacaaaagaaaatgtctacatttgcagtacctcaatcctaatttaagttagattatattcttaaatgtcaaactactttaaatctcctccattttttttcttagaattaaaaaaaattaaagggcatccaaaaagcaatgtgtatgtctcatcaaatttgaggttgaaatggtatttttttaaaagacagacgtgcctaagaggttttcctgttttttctttttccatttttttttttaaatagaaagcctaatgatatttacatacagtctctagcaaagcattatggagacatttacatatttagattatttagaaatttagaattggaaagacaataaatgtcttcatatatctaagttacggtctatgcaaaaggattcagctactcataaaaaaagaaaagtatattttcatttaagcaccgaaaatgtgggaagcttttgagaagcagttttactaggtagactgttgatattaaaagccaggaatcctgagttgttttactgtcgctagtargcagttaatcaacaatgtccatgtgttatctgctatgtacaaagtgctttcctaggatctgctgaagaatagcagtgtatcccagtgcctcagctcataagcctactctctaaggtaaagtaggtgtatgaaatgaatttgctcttcaaaactgaagtgaaatgaactttttttctttgatatcaaataattctgacactgagccacattcactagggtgtcaacaattcaatcatattcagtttggagacctagccttcagttgccaaggctactaatatggtttggctctgtgtccccacccaaatcccatgtggaattgtagtccccaggtgttgaaggtggggactggtaggaggtgagtggatcatgggggtggtttctaatggtttaggaccatccgcctagtgctgtctcgtgatagaattctcacaagatgtggtggtttaaaagtgtgtggcacttccccctttgcgtgcactctctctccctcacccctgctgtgcttgctttccctttgccttctgctatgattataagtttcctgaggcctcccagccatccttcctgtacagcctgcagaactgtgaatcarttaaacgactttttttcataaattactcagtcttagatagttctttagagcagtgtgagagtggactaatataggtacagaggagataaccacggagatgctcactgtagcccctgtgggctgttaaaaggagggggattccattccttctatggcaagcatgggaaatgagcttctttgagggttcctgggttctcaggcactaccagagaagactcattcccaagtctctggtgaagtactattctctccctctatttccatttcaaattcctcctcctcaaaccttgggagatgcccctgctctagtaattcagctctataacctctataggccaagtctcctgaaaatgagctaattcgccaagacatgcaggcttgattgctcatgtagagggcgcaaaggaaaataaatcttttcatccgtctcctaaagcagtaacaatcagacagaaatgaatatcttactaaattatcctgctgcatataaatgctatggaaaatgtatcgatgacaaggtacattgcatcttttatttggcatttcatcatgcaggctttgccaaatttttatttttcaaaaactcatctgttattttcaaataagtaagaaatatatttaaaaagcttttactgactcaactcttgatatgatatattcactggtctatagwtttatcatgacactaaaaataaactccatgctagcatttgatgcaagaactgaaacataatactcttaaaaacagaaatttggatgcagaatatttttgaaaagaaatttctaatgatcaggagatgttcatcctaggataagtgaacataatgttcaaggcatcaacttcttcataaagtgaattagagggagcttttatatctcctcatgatgacaacatccagagctacaaaaataatctttgcaatgaatgtgtttaaatccctttgagcatgatatggaaaaatttcaaaaggaaacagggctcttgagtacacattcaatgtttcatactatagcagagcttttccaattttattgtgaacacgaatcacctggagatcttgttaaaattcaaagtctcattcagtagrtctggggtggggcctgaaattctacatttctaagaagctcccaggtgatgctgatgctgtgggtttgctgatagcactgagtagcaagattgtagagaaaacttagtaccacagttactgtagtcaatactgttgaatttatcttttgcaacatgaacatatcttttataccaaaacatataagcatttgttttcctctagaggaaatttggaccttaaatttaatttttaaagagtcttcatttctggtggccaactggccactgagaggtataaaaaagggagggctaaacaaggcagaccaaagccatgcatagatgatagctgcatagttggaaacttcataattggaaagtgtgtggcactcacataattctggaacccagccaattggccagctatgacttgaggacccctggtgcaccagatgatcttcagtttatgctgggattggtgtgcgtgacaagttttgggcatgtcattttgagatacctgttggacacttaagagagaggtcaaataagtaagacatgggtctggaactcactggagagatttagactgcatttataggtttggagtgggtatgaagtgaacacaaaagagtctaggccacatcctaaggaatgctaacacttaaaggatgaaacaagggaagaatagccaacaaaggagatagagatttaagaggaaaattggagagtgagttctcatttaggccaagtaagagagtgttgacatatcgtaagtgcttaacaaatacttgttgaaatgaaaaacgagaacaaacaaacagaaagcagactgaactgggctcatgaacacctttcaccaagactactgaattgttagcttttcctaagcaatctatagcctttcataggtttgtttctgtcagatgctgtcccctatgcctggaacacctttcagtcatcttctaccttttcttttcttttttctttctttcttgtgtatgtgtgtgtgtgtgcrtgtgtgtgtgtgtgtgagagagagagagagagagacaggatctcgctctgtcacccaggctggagtgcaatggcacaatcttggctcactgcaaactctgtctcccgggttcaagtgattctcatacctcagcctcttgagtagctaggactacagtcacacaccaccatgcctggctaatttttgtatttttagtagagayggggtttcaccatgttggccaggttggtcttgaactcctgacctcaagcaatcccaactcggcctcccaaagtgctgggattacaggtgtgagccaccacgcctggccccatttcttggttcttgcctctgctccccatcgcctgttgtatttagatgtgctctctctgaacttgggaacttggctagccctttttgcacttaccttcccctgttgacctatgtgattgctgtccaacctgccccaaacttgtctcagaccattttgttggtacccaactgggccaggaggcccccctccccagaaggaacagtagcaattgggattgatgaaaaccaatggaggcagataatatttagctgatcttagatgctagtatctcctattcactgtgataccatatatggcaatggctggtgatgtccaagctccagccaagccatgacttacaaccataaaggagttgtagatgtgaacagaggtggaaacggggaggaagctgaacacctgtgggaaaaaaagctactgaagaattaatatcagatttaaaaatggacccaaagtagcggagrgtagaggagtttaagaaatgaatccggggtcagactacctggatttgaatcttattctgtcatttacaaattacttggtcttgggcaagttacttctccagattatggtttagtcattcatgaaatgaagctagagcactaagcacagttcttggccaatataacatgttaaataaatgttggcaaaatgaacatgtacacatgtgtacgcacacacacatacgcacacattatggaatacgacacataaagaaggcttatagagagcagtaagctaggcttcccaaaaatgttcataggatgaaagggctaatcaatttgtttaggggaaacttaatgtattgccctttggatactgagatgatgccttctcagaggaacatatccttgcattctgtagtatgtagtggaataaargactctgagtcatttacatccttttatcaacttttcctgttaccaatgatgtccatttatgaaatcagctttttggtctttgcaaatggagtgggttttccccctgtgtaaatggagctcgaatgaagacstttaacctcatgcgtaccttcttctaatctactaagtttactaacttaggtaayagaaagtaaatgagaatttccagtgctattargtgttcagaatcagtacctgaatgctagctgggagataaataatgacttgaagactaagattttgtgaatgcggataatcactaaaaatccatgaaattgccagccaggaaacttacttgcataaacgtccttatcaacattcttctttatttgcaggagtcaaatcatgtactattggctggcagaatgccagtctaaatcgaatatttgccagcttaaagtttattgacttcaatttgttagttataattactgactttttattttataatgttctagtgctgacatgcttgggggaaaaattgaaccacagcagtgattgcacagtaaggaaatcagcagaagaggaaaattaaatgctaggtgatagtttgaagtcagcagtgatgggaatgagtgggtgggagagttaaatttttaagtaacttagcaaatgatgctaataaagtgccatggcatcgttttggtttttctattataacacaatgtaatttattattttttgtactcatgtaagaaaatcactttatagaaaactttcactgtcttaagcagctcatttcaaaacttcccctaatttttcttttgaagaataatcagagatttcatcttgaaatcccaaactgcttgaaaacttttccaagaagatatcaaagaaactggcagaaacagaaagaatgaaatcagggaatgcagttctccatgtctccctgggatgctgcctcattgagcagagtttccaggggtggacagatgcatgtatttctctttcctcctcttgagaggtgcagaaaatatatattaccttgtaaagaaacaaaccaaagcaaagcaaagccaggttcttttagaattagttctaacctgcttctcatatagcttgaagtcctatcccaaagccttcactgcctgagtacaaagaagagagtttcctcctacttttcaatcacttattttttactttcctaaggaaggaaacaaatattagagcttataagtaatataagtatacatttattttttttctggactcttgacttaaagttgcttcttagtgtcttcagttttcattcatctgtttacctttcatctatccattcatttattcatgccttacccttacaagcctcaggactcagagatctgtgagaatgtaatgcaagtccctgctgataaattacgtagcattttyttgatagtcctggcataagaaccccagttttgcatatagtatttgaaaacattatttgtaatatgcatgggagacggtggtctatggtttaatatttttcagcctgtggcaagttttctaaaattaagtacctgtcagtagactgcctgtcctcttcatttctgcaaattgggtagtatacacatctgaaggagatctcaagtgagaggcaatctgtggctggtgttcagtgttcattcctttttcttcttcatttttcaatgtgtcaacttaatgtcacttcatcagggaagcttgccctgtcccttgcggaccaggtgagtggccctgtaactcttagcggcaggttcatagctttcacaacaaccattacaattgccgttaaatgtttatttggttgattatttattgaatgcctgctttttccatttggtcatatgttccatggggctgggaggaccatgtgttgtttacagtcctgtctccagggcctgtcacygtgtctggcatgtagtgggagctaatttgttgaatgaattaataaaaaagtaaccattaaagaacatttaactattagaagaagtgtatgtattggtttagccttctaaatttctgtgtaattttgcatatgcactgattataattttttagaatcacagagtactgaaatatayggaaatttaaataaaactgttcaattttttaaaaaggcaaaattgaagataaggagatgctataaactagagaaactataaaattagttggaatattaaagtcctctttttaattttttgagtggcagtgtctttctctgtcacccaggctgraatacagtggtgcaattatagctcattgtcacctagaattcctgggctcaagtgatcttgcagcctcggcctgccaagtagctggggctacaggtgcaccaccatgcctggcaaattttttaatgttttatagagatggaggtctcactgtgttgcccaggatggtctcaaactcctggccttaagggatcctacagcctcagcctctcaaaaggctgtgattacagatgaaagccactgggcccagcctaaagtccctttctttgaaagtgaaggttttaaatccaacttgctagtaaaacttttagggtagttaggcttaaaaatccccacactactagtgacttgatggrttagaacaattcttttcctaaggagctgttgtgctttyttattgtaaaatgtaattagcagatgtaaaaaaaaaaggtttattaatcttatggggtaaaattatggttgcttatatgtaaattatttcatgttcatagattgcttctcttttattttaagtaaacaggttagaagtcaaaatgccattaccaatttgattaaaatcattacatttctttctaaaacatgatattagttattttattttccataagaaatccagacttcattagtctaatcttaggattgggattttcagtagccaaatcaaaatgtcttagtgtagattttctgtcaaaaatatttgaaagcatcaaattatgaaagagtaatataatgtagaaaactgaaaatctgcacagctctccatacatttagttcacatgtccagtgagcaatgattaatggtgcctgggctagatagcttctgcttggcctgccacaaccactttcttttgctgtctgctggctgccgtggaaggttcctttgtgcaggcaaagtcaagttctcttgctctctggcttccaatagatttggtcagagggagacccagcaggaggtgtgtatgagggagaggtcagaatgcaatttccttttgaggttgccaggggctggctgtgtccttttagagagattactgcacccctcaaggtggcttccgttcatgactctgtaactgctmtctctcttagggctcatgggtaacaactgccaacctcgacctctgactccttctaggttgtggctttccactgccttctctatatgctgctcctgccttgaaaatagtccctttatttagtctccttgagtcatttgttttctttccctctatgactcatacaatacccatgaaaaggaggtgagaaaatgtacccttttacaattcaatggtctattcaaatgaattatctgaaatcaacatatgactttgtaagtgtaatatatatttatactttcaggcagatatagatacaaaaacactatgttttgaagaaagtgtgtctcatgatttgctgctaaaattttaggttcaccattagtagcaaaccatctttgaattattcatctagcagtgagaatggattgatcttgtctctcctctctctggttgactttgttatgtgctctgtgtttgtgagaggaagattctggtgaggggtgtggtcttcatcctggcccataatggaattcaactcatgaccttaaacctactaactgtgttacactcagctgtgttaactaaccacaggccccttttgtgcaggtgtgtatgtaaagctttgcttggtcttactgagctcatgttggggagatagataaaaatatggtgcaatatagtgtactcctggctctccttgaccccatgatttccccatttcaataggcttcctctcctttgcttttgttaaactccattgtgcatcaaaacccaaaggctcacatcctgctctgaatcaactatgggaactcaactgagaagaaaaggtcagagactgaatttcctatttgacaccaacttgtacaaacaggaatcttaataactgtcgactatgaggacaggattattctgagccagtcctgatttggggaaggaatactactacttcatgtttttggatgcaaacttggggtagtcatccatcttcttttttgtttcacactctggctttacatttcctttcttcttttccctctccttagcctgttttcatgaaggtgggaggagcatgaaagctcagggcagtgtcgggagagttgggccagtgctggacattgacttctagccctaactcctcatttatatctaatttctgattatatactgatgttttgccacaagcaactagtagttttaatactagagagcagtcaagtatataaaaagacaaagttaatggctataataattatgcttttttttgacctgagttttgcagcaaaaacaaatctaccccaaggccaggtggtaggaagctatcatcctgatggcygctgttgctaaccaccatcactggaaaagtgcttggtcaagcactacccyctaagggaagaatgtggcttcaagctgatctttcactggaaaaaaccaatgatgttattgagtagcacaaagaacccaccccgccaacctacttcaccaattaagttccatgatcaatggacaaggttgtttgcagagaacaaaaaccttttttggcaggggggaaaaaammaaaaaaaaaccctttttcatggtgaaaatatacgtgattcaggtcttaaattgtcttctgtctgcaaatctgtactcagatgtatgcaagtttcttgcagaaagattgaaatttcctagaatttggaggagcttcctctaagctgtgctttaggtggctttttgctagccttgtcaggggtgtcttggcttccttgggatatttagcaaaccagtaactgtggtgaacagatgaaaaacttatggcattctgaatagacaaggcaagtttcaagcttattgcaatgttttgatgtgcaagcagtgggaaaccttgaggcagctgaagttgttcttccttgggccacaaaaagtatttctggtatctaaaagtctctgatccccttggagcctcagagaccctttatttcatcactcagtcatgtacaggaaggctcagtgaaggcaacatggagagacacagttggtttgggggagatgtaagcacttttttccctgtctggaatatctatcttacagataaagataagaaagaaggggtaaatgattaaataatctatgatgttgacctttgattagaaatgtaatttttattctttaatgacacattgaagtccgtgggctgtcaaggtgtttgccaaggtagttatgaagttttcatggccatttttggcatttcaaaaagcaaagtggcagttgtaagcttccctacgagaagactgcacaggctacaactgaagcggcacttcggtgatttgaactggaattccatcacttcagcttggtaaaaacagatgccttgtgctgatcagaagttttgcagctgaacagatctttgattaaaagagaatattggaaatgggtggtgttttaacttaaatagttttatagaaaaatatttcaaakttaggatacatggaagaaaataacaaaaggggttcttgattaatggatggatgggctcattttactttcaatgaatatttattgaacacctactatctcatgggagctcatgttacatctgtgaacaatgcagaaaataacsctgtggaatctacatgttagtaggggaaacagaatacacaaattaatgcaggtggtgaaagaggaaggaaataagtagagtgatgaggtcataatggaaggtgaggagacaacactagatggggtggtcagggaaggtctgttgagctgaggctgaaggatgagaaaggccaggaaggacttacttgggaaaatgtttgtggtgatatgtatgagtgctgcaggtgaaacaaaaaggaagccagtgtagttggatcaggtgagtgagagggataggtggtcagttgccagttcaaaggatcctgtgacaggaggtctgggctatattctaagggcaatggggaaatgattgaaggactctaaacaagatttttctaagatctattttgtgttttttttttttgagacagagttttgctcttggtgcccaggattgcaatggtgtgatttcggctccctgcaacctctgcctctcgggttcaagtgattctcttgtctcagcctcctgagtagctgggattacaggtgcccaccactatgcctggctaagttttggtatttttagtagtgatggggcttcaccgtgttgaccaggctggtctcgaactcctgacctcaggtgatctgcccacctcagcctcccaaactgctgggattacaggcgtgagacaccgcacccagcctttaagatctgtttttgtaaaataccagttttcttgctggtgtggcatagatttgagaagagcatgaatggaagcatgaagaaaagtcaagtggctttaggaatccagatatcacagtggcttggactagggtgtggctttttgctccaccattgctaggtcatagcctaagatggctaatggagttccaggcattatgtccaaattctagccagcaagaaagagggaggatcatgaaaaaggcatgccttctccctttaaggatccttttcagaagcttcacttaccatttcaaggaaggccaggaaatgtagtcacgttctgggtggttaggtaaaaactggaggtttcatctagaaggagaacagacactagaagacaataatctctgctaactcctattaataatatatgtaaatgaatttcttttgaaatataatttyaatcttgagctctaagttaaatttttggaatttctcagagtttgcaagtccaatattcacagaatagctagttaaatgtagattaagtaattagctttattaacatctgggcaagcaccaaataactccccaggcacatgactatctgctaagaactgcgttcgagataattcagcttgaacctgtgcctcctactcttgcaccatatctcaaccttgggacccacttctgcctgcacggaagacttaaagttcacttgcagtgagtagcatggacttcaagtatttctcaaatgtctggttgccagtggaatatggagagaagagggtgggcttcctttccaagaattgaggcccagcatggtctcatgacattatagagaaaagaagcctgagatgtatgtggacaggtcagagaataaagagagagcctgctatccccttttgcccaataaacgtagaactctggctttgatttctttccccctccatgttggggaaagtcagtaaaggaacggagagtgagagaggaaatgtttgttctggagctcccaaagagaatggagttgggaggtaggaatctcctcttctgtgggctgaagtgagaatatagtgagagaagaaaaagcgtttttcctaaccaaaataattgttagaaaagtggaatccaaaacaatttttttttaaaaaaagaggatgatgagtgtcctgagttgtataattaattgactcaaataygcttcatttgagtaatagaaatatggccttatttaagcacatatgatakttttatgaagtctcagcacaaagaaaataagaaatgaaggaaagcaaaatgacaggtgttttcaaatatgcagtaggatgccttagggaaatgaagaagaaaggaaatgagaaagtcacctagggacagtggtagagaaggctggaagggcaggtggctagagaagggctaagaagttagggcagggctgagattggggagccacagcagtgttgtcttctacagagacttgtcataggggagtgttyatcaggcttctggcacacccaggggtaatgaaagggcagttcacaaaaagattatttgtaagtgtgggcacagttagaaaaaacaagggatgatgaagtgcttcggagccaacagcagtggggagaccttacaggggcaatggtacagagtggtcactggaatctggcaaaagctttagctgtgggtgaggggttaggtggagaaacagagccagtggaaaaagaaactgtgggataaatactctaacttctttctgtcgcccctcgccctcccatgttctgctagtgcctccgggacaaactcaactagaagccagaggcaaggaagcccaggcagtatggtcatagagagcagcctcctagggtctttggcaggatagggaaggatcaggagggtcgaatggagaatagcctgcacaatattttggtggaatgcaagggaggaggtggtggggaagaagctgtattaaatttcctgcagcagtttaattaattaattgccctcaracattcattgagcacttggtctgcctggtgttggggatgccaaataaagaaacagagaccctgcttggtcttgagaggatcataagccagcagagtcatgattctaatgttagatggcggaggctttggaagacaggaatagcaaaagacagctctgcctgatggagttagtgaactgtccccagatggaggtgacttttgagctggatattgaatttgtatagaggatcattagatagaggagagcattaaatctccctggtatggagaagggtgcagatgctgtgagaatatggagagaaggtacaggtcaggggaggaagatgagacagaatctgatgatctttgtgaaccagaccgaagagtttgtattttatcctttacattggccatgggagttaacagaggcttataaaagacactacttttttttttaaaggatgggggaactgataatgggtgcttttcctagcaacttcttttcttgggatgcttttcttctttttcctttcatttttttcctccgcttctcttcaccattcaccacctttttttccattgctgtgtttctggtagatgaaacctccaaggttaagtgggtagttgcagtgaatttgatgtagggaaaataaaaggaacattccaggtctttaaaaaatttttacttcagttgccagtagggtttaatttgcgggtggtagaaatactggggatgctgggacagaaattaaaatgcttaatgaaccaatgcttaggggtctaccacaataaaataaaaatgagatgtgacttcatgaaaacttgaaaacttgtcttgaaatactattcatataccctgatgtgtattaytgtagagtgaaaaaataaaaatacaaatgcatactcttgcattgctttcccacacattgatctgcaaagagaaaactcttcaagactttggggagaaagtccattactgaattaatcaaacaaccatcttctatctgcacttttattttatataccctttacacctgtttaattaatcctaaacatgaggctgactgctaattaaacagcctggaagtgactgactgaaggtagtaatttgagataattagttttggtttcaaacactcaattttcacactttctgctcatttttagaaagggtggctcattattataggcagggtgggagttgtgtaagtcattttactgctggactcttagtasctcaggaagtgggagtatcggtatccaaataggacaaagaaatggtgtagggctatatattttgctatagaatgctcccctattcccttccccccacacaacccctactcgcacatacatataatttcttctaaagtgaaagtcagatggctgacttattttcgttaggatataggaatgcacatacttttgatatttgggaaatttttacctagtaagaggtagatctcactaagttatccatggtttccttcccaggtcctctgaaaacaaacaagaaaaggtgagaaagggcaagatttggtgtgtggtttgagatttggaggggtgtccttgcgagtagtcatgtacyatgcagtcacaaaatctaaccaggggaaaaatttgtcaaggtaaggtcagtatatctggcagagaaggcaaagggcaggaggaggtgggtcagatggttttcatggtcccacagtgttaacaaataagttaacacagtccccactaggagaacagaaccagaaagaatttggggttaaatgggccacgctattctgggtactctctgttacggccaatgcaggtggatccaagttacatggaagctgaatgaatagtcagcaccatggacagctccaagcacattgctctgctgctgctcccgggatgacttttacgttttaggaacttcactgtcatttcactggccactagtagggaacaggactctctagacttaggaaggttatttagatgttgagagctttacaagtatgtcaagggtggagttgaaatgtttatatagattgggaatcatctgtctacactgtagtggggactattggatcccagagtgtgcagccctgtggggaaagatggaactgcaactccgacatcctctttgagcactgacattagctgcaacatgtgatgtagcataaagttaattttttcatgtacaagtcaaacctgcatcttcaagttacctgaattagggcatcttggagtcactttgatctctgaactttcactcataccacagcatggcagcagaggagttactatacacaatcacatagctcactctcccacattattgagaaatgacakaggattcctcatttcaaagaatttctggcaattcaccccattaaaagaaaaatagtctcttctaaagaatttatggtctggattcccttttctgtgatgttttgaagggggttagaatgatgtttctatgagaggatatgtggctgctggcaattctcaaatctttttgtggcactctgattatatcaataaacagtcaatagacttgcaaaactatatatttacaataatttactaaaaatatagtcttaagactgaaatggtatcaagtataaaaaaatcttatattaaattccctgttagtcattgtatagcatttatgtcctataaagccaaagccagtttcagaggtgaccttttctgatgtatatgccttcatttttctctcctttctgcaccagagcttatcatgtacagactaaaaaagcaacatcaayaaaaagcaacrtcaacaaaaagcacaaatgttttgctttggctccagaaacaatggaaactaaagcaaaatgaaattctttctcactgtttagaaatattgtgcattgagagaaagtaagcctatgggccattcaaaaatactttccaattaaattggtagtcataaaactgtattttggcttcaggttgatatgtctaggtttctggtatagccttggctgtttagctcatatgacaatccatcattcttcaagattcgtcatgggttgaaatgacccatcatttgttytgcagatacctcaaatcagctatgcatccacagccccagagctaagtgataacaccaggtatgactttttctctcgagtggttccgcctgactcctaccaagcccaagccatggtggacatcgtgacagcactgggatggaattatgtttcgacactggcttctgaggggaactatggtgagagcggygtggaggccttcacccagatctcgagggagattggtaagcatatatttatcagatgattgtatttggaggtgacagattgctgatgcctgagcatctccaagtgctctcttatctgtagggaataattggaactcctacagatgcatgaactaggctgtccactctagagggaagctgggtttattataaatgattttgttgttcataggtctatcaaggtgacactttggtgctaatttaggaagtaggactcctgactcaaatgaacattttttaaagttgtctgttttgacaagggagtttgctggcacattagagccactgtaaatttgaataaatgacatactatttgattgttctagatggaagtttacattagcaagtcattaaatttaaaaaaagtcagtggaatttaacatccaacactagagggactaagtctagtaatcatcttaaaacaatgctgaagtagccctcaaggctatacttaagcaatattcttattgtcatatttgactttttgcgtttttattcttaaaactctgaagcttagggtgtgatgaaggacaagatgtaaaaacttgtttacaacaaggtgctgctgatgtctgtcctgggcatttttttcaaggtgcttatccaagtgtctaggcattttaccatcttgtatgtgtacgatgaggttgtaaatccwttccactactttgaaaacacagagcaaaacaaaggaacaacttagagcacaaatcttaactgctgatttgtcaacaacrtatctttgtgaattaagtatgttgttgttacttaagtactattattcttattaagaatgaatgaatttttctataagagtaatattttgtggaaaaattaaagtgtccattgatttttttcagtaattttgagcctgaaggaagacattatgttgataaatttattgtttttcttagaggcctcgactcagagaaagatcatgggaatgatttgggcttaaccataattaccaaggacaaaaagtctgatgttattgaartaggatgttcacttgagagacttgcagatgactgcaagcttttctgtacatagtaggacatagaaaaattataatacacaatatttagtatctttaacatttgttctacatttgtgctattgcagaaaatgtatgaaaggcctggtcttgttggacagattgggctaattgatttaattggacaactgttcacacctgctgtaagtgtgcattatgccataatctttgctctctgggaatttatatcattactgctataaaactgattcaaaacattcaattggtctttaaattatgacaaattatattatcttcttgggtaaaaatctaaagtttatccttagaggaaatgcccactcaaatgaaaacaatagcttctggaaacagggttaatgtattatttaagcagctgatgtcagttcttaccagagtgataatttakcaagaggagaaaactaatagagtatgtattgaaataagttttccacagtgatcctggacattctgcaacttgaggacacattttgtgtgcatgagayagattactataaaaaattcaaaacaggacataatctgccatttgttgcagaatccaacaaaatggattgttctaaaagttaagtgaaaccacagttttattcttttgactaaaataagaaatacttagtttttattttttagggagcattgctgtgctttggtaatactgtcacataaaaggatttagatggtgccattcattactcctgtttctatcatagtcattagcatgggagaaaataattttggtgccttgtatatgctcttgattagagcaacacatttcttctgtgttgatcttttcagtattctgtgacttgattggttgtccattctatttcagttctcacttatctggggaatggaggagggatggattgttaattaatatgcagaatactgaaaaggccaaattagtaccacactggagtatgccatggaatatattaaatatcaaaatcatccctcattttaatgacaaagattttatctagaacaaaaatagctgaaaattaaaccttttacatgacaatgatgktaatgggaatggcaaatggtagcaacttaacccattctgraawtatctgatgkctctaatgaaaattcattagttctgtaacatttgcagctcttactacaacattgatgmcatctgtcaccatgttagtagtgtgtttttaaaaaaaaacctcagtagcttgagtgagaaagagatgtatacattcaatttttttggagtgtctgcccattaataaaattgtatatttccccaactcataatgttttctgtactttgttctgaatttctctttagcaacatcgattgctaagaagtttcagtgtaaattgaggcttcctctgtcttacctctgattaactcaagcagatcataatggaatgatggtgaaatgaaaattgggttagtgataaattgcttgtacagtttgattagaatgtttttcatttwaaaaaaatcagacttgggaaagtgtcctttgcgaatctgggagaatgaagtttatgagtgtatggtggtcattgatcagacctcagtgatggctcttccctagttgagatctttctgagtgggagagggccaggagacacttggtaaagacaaatagccccttgatatcccagctgttatagtgtcatcccaaggcatctcttgactataggattattgctggagaaggaaaaaaacatatttggtatcagcarayagcacagtttttctgactggagcatagtttgtttagtgaattatgggagacaaaattggaaggtttgacatagacacatgattatttcaaatcatagggtgtttattttatccttagttttctagacaatggaggtgtgttagaccattcctgctttgctataaagaaatccctgaaagtgagtaatttatgagaaaagaggtttatttattggctcatggttctatgggctgtacaggaagcaaagtggcatccactactggggaggcctcaggaggcctacaatcatggcagaaggtgaagcaggagcaaggggaggaggtgcaacacacttttaaatgaacagattttgtgagaactcactatcttgaagacagcaccaagcaatgagagatctgcccccatgacccaaacaccttccaccaggccctgcctccatcactggggatgacatttcgacatgagatttgggtggggataaatatccaaactatatcattccaccttggctcctctcaaatctcatgtccttttccattgcaatagtctccccaaatgttaactcattgtagcattaactcaaaagtccagacttggtgtgatggctcatgcctgtaatcccagcactttggggggctgaggtggagtttgagaccagcctggccaacatggtgaaacccagtttctactaaaaatrcaaaaattagctgggcatggtggcatgtgcctgctgtcccagctacttgggaggctgaggcaggagaattgcttgaacctgggaggtggaggttgcagtgagccgagattccaccaatgcacttcaacctgggttcaagctgctggtggatctactattctgsagtctggaggatggtggcctctttctaacagctccatttggcagtgcccccactggggactctgtgtgggggctccaaccccacatttccccctgacactgcccttgtagaggttttctgtgatggctctgccccatcagcaggcttcttcctgggtgcccaggcttttccatacatcctctgaaatgtagggagagggtgccaagcctcatcactctttcactctgtgcacttgcaggcttaatgccatatggaggctgtcaaggcttatagtagctcatactctccagagcagtggcatgagcaatatctggggccctctgagccaaggctagagctagagtggctgggatgtgggtaacagtgtcctgaggctgcacagggcagtggggccctggacctggcccatgaaaggactcttccctcctatggctgtgataggagggacagctatggaggtctttgaaatgccatggaggactttcccccattgtcttagatattaggacttggctctttttagttatgcaaatatctctagcaagtggttgctccacagcctgcttaaattcttctcctgaaaaagctttttctttctctgccccatggctaggatataaattttccaaacttttataccctgcttcccttttaaatataagttgcagctttaagtcattcctttgctcccacatctgatataggttattaaaagcagccaggccacattttgaatgctttgctgcatagaaatttcttctgctgtataccctaggtcattactttcaagttcaaacttccacagagtcctaagrcatggacatagtgcatccaagttatttgctaaggcataacacaggtaacctttgctccagattccagtaagtccctcatttccatctgagacctcagcagccaggatttcactgtccatatcactattaacattttggtgaaaagcatttaactggtctctaagaaggtacaaagtttccctcatcttcctgtcttcttctgagccctccaaactcttctagcctctgcctgttacccagttccaaagtcacttccacattttcaggtatctttatagcaatgccccacccctcagcaccaatcttctgtgttaggctgttcttgcatttctataaagaaatacccaagactgggtaatttatgagaaaagaggtttaattggcttatggttctgcaggctgtacaggaagcatagcaacatctgctcctggggaggccttttgaggcttacaatcatcacagaaggtaaagcaggagcaagcacaccacatagtgaaagcaagagcaagagagagttgggaatgggggagatgcaacacatatttaagcaaccagatcttgtgggaactcaccatcctgaagatagcaccaagccatgagggctttgcccccatgacccaatacctctcaccaggccccaccttcagcattggggattacaattgcacatgagattttggcagggacaaatactcatattatatcaggaggaaactgctgaggagagggggatctatcagaatgtatatttaaggttgtactataagaagtagaagacaaggagaccagttcagcgtccattgcaataacaatcttggcctgatatagggcagtgataatataaatggaagaggagatagacttgggggtcatttgtgaggtgaagtctatggaatttagtaacgggacacagagcttgagggtatgaaagaaattaaagttgaacttgaaattgcatacctgggcaactaggaaaaggcaggtaccataaacagaaaagagacagtaaaatgaacacagtaaactttaggtaccagtacatagctttgtggagaagaatagcaaggaacattgatctagagccaagcaggaactgagatatagatcaaagctcattctcatacaattgatggttgagtatggaaaggtggttgctaaggtgagragtataggggaatgaggatggactcatggggagaagctttcatataaaggtatgtgatatggtttttctgtgtccccactcaaacctcaccttaaattataataatccccgtgtgtcaagtgtagggcaaggtgragatcattgaatcatgggagtggtttccctcatactgttctcatggtaatgaataagactcatgaggtctgatggtttaataaatgggagttcccctgcacaagcattcttgcctgccaccatgtaagacgtgactttgtccctcatttgccttccactatgatttgaggccacccccagccatgtggaactgtgaatcagttaaacctgtttcctttacaaattactcagtcttgggtatatctttgttagcattgtgagaacagatgaatacagtgtgggaataatggcctagacattgcaatgggaggtaacagtatggtagagtgttctcttttcatgggtttatggtcatgggagggctctsagtctcctttgaagaagacttcaattatgsgagatgataaaaggagatcctcagaaaaaaatttaaggatgatgagcagtgtttcataagaaaacaggaacttttgccagaatgcatagctgaacgtgcacagtagggttggggttagggctagggttcctacatgaagagaggtccttgaaaggaggcattttatagtaaaatatagtatactagtggcttaaaataatagaaatttatcatctcacagttctggagactagaaataaaaaattaaggtggttgcttctgaaatttgtaggagagaatccctccttgcctctattagcttctggtgtttgctgacaatccctggtattccttggcttgtagatgcatcactccagtctctgcctctaccatcacatgaccatcttcttgtgtttatctctgtgtcttctcttcttataaaaatgaagatatattggaataaaggcccactctaccccagtatgacctcatcttaactaactacatttgcaatgaccctctttccaaataaggtcacattctgaggtactgggtttaggatttcaatgtatttttcttgggagataattcagttcttaacagagggtgaagaagggtatactcagaaggttagcttccagtggtagggatgggatttgggctaggaggacaacaggttagtaataagaatgagaagggcttaagcagacagaatttggttaatggagaagcctgtaatatagcgagttcacaaattccttttggaatgttatggaattctactctcccaatcctgattcttgggtaaatgaggtaacctaatggataattcagggttccagactggggtaagtgatgggatcccagtgtctgtctggctttcctaggtagagctcccagtaggatcacaatagacactgccaacataggtgtgtacctgctgttcacctgccccactttgtaattccaagaagcttctctttgatgacacctggaatatgacagacatccagagatttttttctggcctaatttatttttatttccccttttggtcttttggcctgagggaagggaatagcttagttgctgctggttaagacctacgtgttacacaacactcagctattagatccacagtcctctatttctgtcttgttttaattccttgatataatgtttcattgacattataataaaggagttaataatattcactcatgcttttccatcataagctctgggcctggtggctcatgactcaataaatgacttcctttagtctttagacaggttccttcccttctttgtcttacattattatattatttttaaaagaagacaggataataaatgttaatgctactgctatcattataaggggcaaggaagctaaagctttatctttgaagataaaaggaatatgagagaacatatcttttcattgtagatttgcacagtatggcrgcacaccttctttaatcagtcatcatgtttatgaatggcttattgaagatgacaggccttcaagtcatcattgcatacattacagggggcagaatagacctgattctgtcaaatattctatgtgtgtctttctccccctaaatttgcaaatgctggaagcttctgactattgtttgacatgttccgaatattaacatcttagagttggaagggaccagagagttgttgggatggcagattctgtttgaaatgttaatgtaagaaaccaatttaattaattcattttttgtgtatataaaatgacagttgccaaaaagtttgatagttttttttttgtgagggtcaagcaataaggtaaggaaagtttcatccctagtgtacaattgaaacgtgttcactgatcatatttttaatgtatcttagtacrgttttaaaataaagcattttcccctcttgggttataaacaagaagcaagtttctggtaactgaaatggattcactttaagattaaaacgaagtattttcaatgacagaaaggaaagaatacataaacagcagtgtttcccctcagatgttcattgctttgggaaaatgacttccagcaggcaaaagtcaatttgagaaaagtattaatgttgtaaaatactatgaatgaaaggaaacaatttaattcaattgaaaattttactttatatttgtacagctgagttccattgataacaccacattttgagttacaaatcatatttaattaatattaacaccaggtaattggcaagaataacttcaaaggagggctgaggaaattgcaaattggaactgcaggtrcagtgatactgtagaagctttatagggatccaaaggacatgcatatgattttaacagttattgcagaagctgatcaaatatagtgtcatttcaaagctgttcttcaccccagccattcctaatatttrgggcttagtaactgccaagtagcaacagctgctgttaatatgaaacagcaaacagcattcaaataagtgctttaaaacctatgattctaatgctgtagttaagtttttagtaaacaatggcartttgatgcagtagaaccaaccttggagtcaaaagcacttctttaaatccctctttttcaattatgagattttgttaacaagcttctctgagaattaatttccttgtctgtaaaatggatgccctgtctgctcagtaataatycaatgatataattcttgtgaatgttctttataaactcaaaagtgctacttaatatcaggtattactagtgaaaggaatggggataatacagattttcccccaaaaggcataacaaagctgtrtattatcataaagatggtaggtatgttgcctggtgtgcaggatatttgaaatagcagagggtttttgcttgatttgttaattaccttcaatcttaactatatgtggctaagattctacatggaagaccagagaggaagctttcgaatgactcctgaccacctcccctctcttttccagttctcaatgccatccacccacttctgggctaagtattctaccctgtcctgtttttgtcatccttggttattgaatattatttgccatgtcacctaacagttgcttctacttgaatgtgaccattcagttgccactttaaaagggttgagatttgaggacaagtttggggtatcttgcctcatccttagcaatgtgcttccagggtccctgcgcttaactctgtggtaccacttgccactctgattgtagtgctgatttctctgtcaatcttttctatcagcatgtgttttttcttagtggaaagatcccccaatatccagtatagtacctggcatgtaacaggctcttcatgaatttctgttgaatgaccattgycaccagattcctagttgtgttagtaatgtgagtctgggggtaaggtttgctcagcctctgggaaccaaagggcagagctgcttccaaccatgccttatgcattatctttgataacgcatgggaaccttcgggggttactgtaatgttaagtcacttagagttcaagtttttattgctrgcaaataccaaaacctataatctgtaggttcatccaaccctaatctcttaggcagcactggggagtggttaagaacttctcactggctgggtttatgttccagatttgtcatattgtagcaaagggatctgggtaacttacttaatcatgttgtgccccaatttattcatgtgtagagtggggataacaattgtataagaattgggtgagatcatacataacaatgtgtggctcatggctagtgttcaacaatggtcaatttgtatttttttttttttttagacccagtctcactctgtcactcaggctgaagtgcagtggcatgatcttggctcattgcaccctctgcctcctgggttcaagcgattctcctacctcagtctcccgagtagctggaattacaggtgcatgctcccatgcctggctggtttttgtatttttagtagagatagggtttcaccatgttggccagactggtcttgaactcctgacctcaagtgattcatctgccttggcctcccaaagtgctggcattgcaggcatgaaccaccacacccagcctcaatttgtatcttgtaaggagcccatctacaccagcaggtagcctatgagtgttcttactggcctgaatatatatccaatttgctcaatgagcaaaaggcagcagagaggctaagtgctcaattaagggcagcccattcttgcattcctgaaacttgctctataccttagcagtgatcaatcttattgtttcttcacatgactaatgtattacctgacatagtgctggcccatagttaaatacatgaattcatgaaataccagtcagaaatggctcaccaaatctgcttgcttcctttttcattttgaatcttcttaagaatgaatcaattcagtgagcatttatagtgcatgtgtcaggtgatacttgtgctgggctttgaggatacagagacaaatcatggtctttgctttccagcaggtcactgtgtttcagaggaggtggagatgcaaacaattacaaattcatgtgatctttgcctcaatggaggcatcatttagaggcattgcccccaaaacactgtgcctgagagagagcatcctgcagttcatgtaatgaaaagacctggcatgagacagtggagcaggacagctatggaccccaaactcaaaggaagtacacagtggcatatgagttaaattaattcagacaacttgagtagaaacacagtttcctaaggaaataaagaatgcaaaaagttgaatgtagaatattatgccaactttgtaatgtaatatatgagaaatgtttaatatgtgtaaaatatctagtgtttgacggttcttatttcttcctctattgatgattactgtcatgtattctcttacatgcaatcagtgtgtggstttacctgacactattagtccctgctttccatgatcacccctacccagcatcacccatgcccttggcagcaattttaattttgttcagttcctgggtcttagccagggccaacagcttccacccagcatcaacccacaagttgccagggtttggaatggttttgtcatgatggaccctgtgtatggttgtcctggggtgaaccctgagcccctctctgtcactgcaaactcacagtgatgtcccaccagacatttgacttacacttcagatccttggagatggacccatccctgtattctggcctcctggttttggaccatgacatactacctattccttgtcaactttacctgactgggttgaagggtctcctcttctgcctttattctcacacagctggtaaggtttgactatgcatgaagccattgagcagaatcctggctattgtatggggccctgaccccctctagcttgttgtctttatatttctcatgttcttttagtgtcatacaaatgaataaatgtgaattcccaagtataaaggaatttagcctcaagtgatagtttgaatctctttcccagagattcccgtacaaatgcttgaaaagggccaggagcttcacrtgaactgtgtggtccctgttttcagttatttattattttcctgctacctaactcctattgccaactrtattagtttgctagggctgctgtaacaaagtcccataaactgggtggcttgaataacagaattggcctccacagtttgggagccagaaacctgagatcaaggtgtcagcaggcttggatcctcttgaggctgtgaggaggaatctcttccagcctctgtccttgcttcttgtggtttgctggtgatatttggcattccttggcaagtagaagcatcacttcaatctctgctttcctctttacatggcatctccccagtcatggctgccggattgagccctgattaatgaagttctgtctgacccaagcccatatttgttctggttctttgggtgaattttggccctgggattacccattttctcctgagggattagcttctgtgatcagagccttgccagctggtctctgcatgcctcccaagtcatgacaggaagtgtgcttctctcccatgctcagccccaaagaaatcacattcttttattttcctttccaaagtcatttccttgttaaagccattgtgtttggaaactccagcactagatgagagctttaagatgcaatctgtacttactgtgttgatagaagaacataatataaaaacacccttctgcagaaatgaarcaacatcagaatctatttatgtcattttttataggccttaaaagagttggcctgagaattaggagtgtattttctcagtttacttcatcatgtatcaactaagcaacaaatatagtttccttgaaaataaatggcttcataatataataaaatcagaaggctagcagatgaatagttgattgaaataggtgcaaattatttcaggggttacgtccgttggtagaactgggctgcagagtctctgtcctctaggatctgcatgtttgacagactgggctttgttctgtgcttttttcactcttacctgaccaaaaccatttcatgattcattgggggtcccacaagaggaaggcagaggaatggaaagaaagtgaaactcaagtcagcatattttgtttcttgttaacagctctgggaagagatttggttgggaaaggaatttcaagtaatgatttaaacatattttctggcagttgtagcagtgaggaaaaaaataatctctcttgtagcagctcagatacacttccaaggcattggtacttatggtcatacgactctagagttacatttacatcatgaatcatggctggcatgtgcataacgggctattaagggaaatagggttgttcagaatgcattgctagccttgtgtgtttcatatcatggaggacaaccactgttttcccctttaaaatgttgcttgatgatagtgtcagaggaaactctgcgatagatggaattattcacgtgagctgatatgacattttatttaacaaatatttgagcccctactgtgtgttggggccttgttctaggtggtagggatatgatgctgaatgagtcagacctgcttccagtccttgtgcagtttccagtcaagcttaccctctttgcatttttcatgtccttgtagtctcagatctctctaggctacaggaattttgcctaagcctacagagtgagatgccatgaacagagagtccatgaaaaggtagagatggcctacatctatcataataactacttgaccccttgggtgttctggagatgctagagttcacttgaggtgtctgtggcatgctgagggtaggggtcacacatttgaataagaaagaacatgtgtgcatgtgtttttgtgggcacacacagaaggctaggcctggaccgaggaaggagctaggccagcttgccaggtgcagttgtttgggagcattgccaggtgcaggtggcatgaagaattccattcaggcttatggagcacagatcagagatggtggtgttggtgaggacctgaacatactgccacatggcaagagagtcacgcatgccacctcacagcctggaatccgtgcatgtcctctgtgttagtttggttaacattttcttttccttcttttttcttttccccctgagacagagtctcactctgtcacccaggctgtagtgcagtggcacaaccttggctcactgcaatatccgcttcctgggttcaagtgattctcatgccttagcctcccaagtagctaagattacagtcatgcaccaccacacccagctagctttttgtattattactattttttagtagagacaagatttcaccacgttacccaggctcatctcaaactcctggcctcaagagatccacctgccttggcctcctgaagtgctgggattataggcgtgggccaccgtgcccagccaatgttttattttctttctgttcacagtttatttccaggaagccttctctaatcttcatcccctcctcttcccacccaagttagatttctcttctatgtattctgtcaaatgaaaacaaatccagacttagataaggagggattttattcaaaagaaagaccattgccacagagagaatgctccaacctcagaaattgtcaagtgtcacaaaatcaaaaagaaagaggcttccattatatagggtagggagagataagcaaaagcttaattaaaattgtaaaagggattaagcaatggagggatgaccagtggaacgggggaatgaccagtgggatggggtgatgaccagtggggcgaggtgatgaccagtgggacggggggatgactagtgggatggtggggggggtcatcagtgggacggggaatgatcagtgggatgggggatggtcagtgggatggggggatgaccagtgggatggcggggatgatcagtgggttggagggggagtcatcagtgggccggcggggaatgatgagtgggccggcgggggggtcattggcgggacggccggggggtcgccagccagacggcgggatgaccagtgggaccgcgggggtggggagtcatcagtgggacggcggagggatgatcagtgggacgggagggatgaccagtgggaggaggggatgatcagtgggatggcaggggggtcatcagaggatcagtgggatgggaggatgatcagtgggatggtggggtgggtcataagtgggacgggggatgatgagtgggacaggggagcatgacgagtgggatggggggatgacgagtgggatggggtggatgatgagtgggatggggatgaccagtgggatggtggtgggggggatgaccagtggratggtggtggggggatgactagtcatcagtgagacggggatggtggtgggggggatgaccagtgggatggtggtggggggatgaccagtcatcagtgagayggggatggtggtggggggatgaccagtgggatgggaggatgatcagtgggatggttgaggggaatgatcagtgggacagggggatgatcagtggaactgggggatggccagtgggatggggaggatgatcagtggggtatgacaggaattgtcctgctgtggtcagctgattctcagtgcaagctaataagggggccacattccagtgtttagtgctttctcaggcttggggccaagtagaattcagggacctgtaggaaggagagaatcctgactaaarttctgtcaaggcaaagtaagagggtaagaggtgaaccactgtgaacacttggtcagtttctgaggtcccatgcagacatcttaccactttttaaattattcccttctttttcttcagaggtggaaagcataccacagacatctttcattagcactgtagctgcactgtctagaagataatctgagagtgcttgttgaatgaaggaatagatggacatggcaggtgagtgcatgctggagacaggacatcaggaagtaggtagcttggagaaagtcagatggcgtggctaacagtccacataaaaattgttctgtagcagaggatgggaccctgccctagggtcagggctcagcatctcattctgtttagcaacagttgagagacatgggatctgggttctggggcatgccagtgccgcaaccggagggcacatgggaaggaaggagagccgggaatcagaattagggacaggtttcagttgggaaacagaagcagtagcttaagtacatgatagcaggattgacacccaggttgctaaacttgaatctgaaaaccagaaccagatagtagatctaccattcttagattaagaaccagagatctgctatgtcagacaaatagagtggatgcaaaatcagaagtagataaatctgatgaatatattattcctctttcaattggtttggaatgttccaggtatgtaacatgagatgtgagtcatgactgcaagatgtcctaaggtctaaagcttctgctattgagtcatgactccaggccctgatgaacttgcttattcmccattcatttaacacataattggtacccaaatgaagttccaagaacttgttaggtgctgggaatttacagatctggtaaaagcctttgaagggatttgatttggagagatatggtacagttgaggtacgtgtgcagaaactggattgcagggtcaagatggaagcagaagattagttagaaatctattgtgtgtctccaggcaagagctgggattggcttggactggagtgggaatgagggccagaagcaagttggtattggcacaagtggtcacaaggtcccaggcatggaggatgggaatcacttgatgctgtggggatctatgccattgaaacaaaactcatttaagacatcttggccaaccgcagtttgtgtcctggagcccttagattgggatgggcatgtgcagaatgactatgtggctccccagaaagaatcccacagagaatgatgcagagatgggacatcagatgaattatttcctggcaaaattccactcaagactcagcatcaatgatacttccttagtgaaggcttcctgggttcccttaagtagtgttagatgagctctattctgtgattgcaacactgtgtgtgtacctttagtaaagaaagcatttgttttactgtctcagacaggacttaaatgtaagcctatgaggcaatttagggtacaaaaacttaaaacagtataggagtaaatctgacttctcaggcagggttagctccayattttaaaatgaagtctacaggaatgtgtcttgctccagctmtgggctctgctttctggtgtgctggctatatgcttaggttttgcccatgtggtgggaagatggccaccagcagctgtaggcttgcatactgccagcttagtaactgtattcatttcccagagctgccttaacaaatcaccacacactgggtggctcaaaacaacagaaatttgttctcccacaattgtggagccagaagtccaaaatcaaggtgtaggcagggctggctccttacagaagctctgagggaggatctgctccatgcttctctcctcggttttggtggctgccaacaattcttggcatccctgccttgtagctgcataactccagtctctggcttcattgtcacatcacctttctctctgtgtatttgttattttctccttttctgtctcttataaggacacttgtcattggatttagggctcactctattctaagatgatctcatctcgaattccctactgcagttatgtttgcaaacaccttattccagataaagtcacattctgaggctccaggtggacatatcttctggggtgatatagttcaacccaatacagcacctttagtggaaaggatgtgcttcgcttccaattgtgtccgcagaagtccaaggcttggcccccactgtacaagaagtgacagttcatcactcaagcaatcactgtggcctggggaaggtgctattcactttagccatgcatgggacatatgcccatttctggagctggggagagaaagctggggtgagctccacttgaaacatatggtcaaagccacagagaggtgtcatttcttaaagctaaagtgtgatgctctcctacaacaagaagaagagctgcctggcaggtgaaccacacagatgtccattgcacatgctgtatggtgtcrgtccattgacaccactgcgttctacgtagactgtaactttctcaggggaattagcaacctggtcttattcatcagtgcccagggcatgaaagagctctatcaacatatgttaaattcagttacagtagccaaaattcccctgaaaaataggatctaaatgtaaccatgcatcataatattcatcagaaatagttttggctttcatctaaatgacaacaaagcagtttcaaggacaagaaaaagcttctgttagagcattctccccagctttgtaaaggctctccattctgtgctgccttcaccarccctagtgtgttggcaaccaaaggaattaacccagggccttcatggttattgagaggaaccacatctacctacacattagttatctgtggcagaatgcagacttcactcaccaccaccaccaccaattgagtccagtcagtgaaaatagcacatattgcataccagctaaagggcttccctaacaggacttctcactaatgggtcactctgaccactagctaattggatggcaatcagaggagccctggcaaaaaggagagaaatagacattttgtttgactgtcataaacatggctgagtcctctatttttaaagaaaatattttatttctttttatggtttcwaaattatttttcatttcctcrtttaaaaaatggaattccatgtgtgattgtcaggaagcatggaagccttgtttgtactgtgaatcgtgaagcaggcaaggcactctgggggagccctattattgagcactgacttttaaaatgtcaatgtaactggtatatgtgataggtgagactccacagtaccacttctttattttaaaattttaaatttttagattcttcatttttttatttcattttattatggtaaaaagtcttaaacataagctctattcttaactaatttttaagagcatgctgcattagtgtttactgtgggtgcagcgttgtacagcagatatctagagcttattcatcttgcttgactgaaactrtttgcccattgattaaataactccccatttttctcttcccatagttcctggcaaccatcattccagattttgattctatgaacttagctattttagatacctcatataaatggagtcttgcagtacttgtctttctgtaatgggctgatttcacttagcgtaatgtcctcaaggtttgagttttgtttttggaaacttcttaattttgcctcttcctactgattttacacctgtgaagtctaggattctcccacccccatctggaaggtatattggtctcatactcttcgttctctattcacttctaaatatatgaaaagtctcatttcagttattaaaatgtccagtcctgtgtaataaaactgaaattcagccaaactgaaagtttctcccctcccacagcttggtgttgctctaagctggaaccctgcagtggagaagggcctgggactgaggctggtttcttctctgctgctcctttttctctttttctcctgccccagctgcaggtcctgtgttaatgtcctgtcacagttaaggaagcacctagcagcaaaggcattcctggtgtcaggtgtcatagtacctgtccttaactggaggtgctctcctttccacccttatttattttttcctyggagaaactttagttttctccccagcttttggcatcgagccctccctgtgggccaacatatgcttcaggtctttatctcagcagcatgaacttgtgagttcagcttttctctcccttgctggtaaacaacaagctggagggaggacttgattaatgaaggtggaacaagagcagaactctggtttcttttatttatgctaaaacaggagatgtcccttggtcacattccataagatgcactgcaccctggctatgggcacaatgctgtgataggcactggagacggacacaacagttgcccttcaaagtttagagccaagatgagaaaataattgctagatatacacacataaactatgcaggtgcagaggttgaggtractggttccaaccagggacattatgggagggctttatggaggggaagcttgggctaggtactgaaggaaggggaggtgcatgtagacagagaccagggaaagagataaaggcatttaagacaatgtgtgcttcactgagttaaagactttcattgatgactgctcaagattgcttcggaatttggatacatagctttctgaattgtttaaaaaaatactgggccaggcgcrgtggctcacgcctgtaatctcagcacttttggaggccgaggcagkcagatcacgaggtcaggagatcgagaccatcctggctaatatggtgaaacctggcctctactaaaaatacaaaaaattagatgggtgtggtggcgtgtgcctgcagtcccagctacttgggacgctgaggcagaagaatcgcttgaacccagaaggtggaggttgcagtgagccgagatcatgccactgcactccagcctgggtgacagagcgagactccatctcaaaaaacaaaacaaaacaatcaaaaacaaaccaaaaactttgcttcctctggcatgaatgcctttgttttcttcctcacttcgattttatgatccagagggcccgctctattgacaataggtatgtttccaatattcttgatatgcatactcaagatagattaaagacttaaatgtaagacctaacaccataaaaaccctagaagaaaacctaggcaataccattcaggacataggcatgggcaaagacttcatgactaaaacaccaaaagcaatggcaacaaaagtgaaaatagacaaatgggatctaattaaactaaagagcttctgcacagcaaaagaaactatcatcagaatgaacaggcaacctgcgaataggagaaaatttttgcaatctacccatctgacaaagggctaatatccagaatctacaaagaacttaaacaagtttacaagaaaaaacaaccccatcaaaacgtgggtaaaggatacgaactgrcacttctcaaaagaacacatttatgcagccaacagacatatgaaaaaatgctcatcatcactggtcatcagagaaatgcaaatcaaaaccacaatgagataccatctcacgccagttagaatggcgatcattaaaaggtcaggaaacaaatgctggagaggatgtggagaaataggaatgcctttacactgttggtgggaatgtaaattagttcaaccattgtggaagacagtgtggtgattcctcaaggatctacaactagaaatactatttgamccagcgatcccattactgggtatatacccaaaggattataaatcatgctactrtgaagacacatgcacacgtatgtttattgyggcactattcccaatagcgaagacttggaaccaacccaaatgtccatcagtgacagactggattaagaaaatgtggcacatatacaccatggaatactatgcagccataaaaaaggatgagttcatgtcctttgcagggacgtggatgaagctggaaccatcactctaagcaaactatcacaaggacagaaaaccaaacactgcatgttctcactcataggtgggaattgaacaatgagaatacttggacacagggcagggaacatcacataccagggtctgtcagtaggtggagggttgggcgagggtttgcattaggagaaacacctaatgtaaatgaccagttgatgagtgcagcaaaccaacatggcacatgtatacctaagtaatgaacctgcacattgtgcacatgtaccctagaacttaaagtatttaaaaacaaaaaacaacctgtrgtctttccttccaccagccttcagtagcagtgactcctgcactgacaccaccagtatgagtgggtaagttagtgatgggacagaaacacttctcaagatcttcaggcttggccaaggtgagtgaggcttagaatcactgtctccctcagtgatgatctactctgcctttctgtagatgtgacacaattgtgccatggcttaattttattgacttatagaatctaaggcttattacaacctcatgtcccccatgttgtcaatggtcttgtgtccacagagaactgtaacattaatctataatgaaggtgctctgtggttttatgtgttatttataataacaaacatggtttatagtgtatytaatgccccttcgtctactcccacatttcaggtactcaaatgcatagctgttggagatagcaagaggactacatttttacttattttcttaaaatattccaactcctattctgttttgtgtttaaaaattctagtgtttgcaaatatcttgaaggaacagcctagcctcgctctatttttaatattctaccaatccattctgccttgcccaccaactctgtttagaggttgagaaacatctttttaactcctaaaagatcaaaaatatcttatcaaaactcttcccaaggaaaagtagacctacttgctatttttaggcaccttcaatgatttttaagccccgtattacattatgagatactaagtacttttttccctcactaagggagcagataagccacaaatgtattctctagaagtttgtatctctgctaaggtctccaatacatgtatgaagtacttgttctcatatttccgggtagtatgttgtcaggtgttcaggttccccaaatgaacagaacatagcactgtctcctagggatttatagtctagagggggtgttacttacagtggttggtaaattctgtactgaagctctggaaggacagggatgaaggtactttattttgcccagagatatcaggaaacactttcagacaataatggtgtttgagccgattttgggggaaaagggagcagcattccttttgtgaaagaggggggcagcatttgcaaaagtttagaaccaaggaagggtaatggcaatttcaaggaagcagattttgttgttgttkttgttgttaggtaggatgcaaggagtatgggggcttaggaaagggatgatggggggaccttgtttttaaaccaaactaaggaggtagggcatttgaagaattatataaagggcagcagcgtgaccagatttgtgtttgagggagttccttctgatggtaggctgaaagatkaatggagagattcagtccatctgtaggcagcaggttgagttagtagggtgttgcaatagtccaagcaatgaataacaaggtcctaaataargctgtggttgcaaggatggagatgaggtgactagtaggaagacctttaagaagtagaatcaaacaattgcaagcaatggggtatacagagtgagggagaaggaagaggcagggatggtgctcaaagttttggctttggcacctaggtgaataattatattatcaacgaaagtgaggaaaacaaaaagaaatgctttgaggtgaactaatattttaaaaaatattattgagtaccttgttctgttaagtgcacaagtgtgatggttgattttatgtgtcaacttatctgggccaagttgcacaaggtatgtggacaaatattattttggatgtttctgtgattcttatcccatcaggtgaaggactgaacagaagtttgaccttccctgagcaagagggaattcctcttggttgtgtttctgtggagaaccctgactaaagcaacaggctttgaggccatgctgcctgggttccgatcccgctctggcacttgcctagtgacatcactgcgtgactatgttagacaaatgatttctccaagccccacctgccacatctgtaaacaaggttaacaatgttcttgacttcctatggcttttgtaatgattaaaagagaaaacccatgtaaagttttaagcttaggatccagcatgcaataagcttttaagaaatgtttgycattattattataatcgaggaaacatttacgcagtagtgttaatgactaataacagytaagattgttactttcccaggagagatttatgtcataatagggatcagagttttccattagaagaatggaaacttccattagcctcttagcttaatgctttgcacattgaactaataggtaaatattcattgactggtcgaattatttcctggtatcattgagtgggattgagaactaaagcaggttaagaagggagaaactgaggcccagagacatgaataacttaataaagatcatagagtgagttacaargaaagactagcaccagggactcaggtttccttgttcctggtctattggaacaaggaagcccacccctgaatccataccacataaccaatccccaggctgccacaccagccctggcagartggactacattttatatcccctttggcaaaatccctaaagagcttattcctgaacagaccaaaatatataaaggcattgtattttttaattaaataaaaatgttttcaggattatcagcccatgtgaatatgraatgaaagaaggcaaagagcggtatagtttgttctcttccttttctggtgagcatctgcaggagcagtgtgggctcagtgtgtacccactgactctgtgttcactctcccttgaatcccctgccactagacttcctctctactcactctggtgaaattactattactttcttagaggttctttctgaggccaagtccaaggccttttcctggcttccttccttcttgacccctttgcatcctccagcactgctgataccttcagaaattgtctcctttwtcagcactcagaattccttctcccatgcttctctctctgcacctttacctcctcccacccgtgatggtgaatatttctaaagaaactgttcttggcaatctcatmcaagctttcagtttcaattgtcgtctctatgctgatgactccccaaatgatatcttcagttctgatgtctcatctgagctccagactcacactctctcattcatattcatttgctctccctttttccctctgcctcctccctccccttctggcccaggcacagtactaggtgtgggggtttacccatgaaggccacagtttctamcttcgggttccaggttagtgggagagagacaggcattaactcacccaattacagcacttctgacaatttgaaaaatacagggcaaagatgtacctaaggttctgtgggaacacaggtaaagtaaggttactaatgtttcactctctctgggtaggggtgatgccaggtgtggctccatgaagccaatatctgcattgcattgtgaataatgagaaggtgttagtcaggtaaaagggctctagggaccatcctgctctactgcacagggatggagaaggcaagcatgtgtttgcaatggcaagctgttcagtgtgactggggcacaggatacatggagttcagggtggaggcaggtgggggaaatggggtatgagagaacaggctrttctgggcaaaggctagcccagaaaggacctttcgtgctattctagggattaagtgtctgctaaacatctctaattagaatctcatttctatattctctgacaccgaaatcttctcccttaaatatcgctgctgaccatattaaatttgagctaacaaggggatactgartgatgaatgttttgtttatagaatgcgtttatttttggtaaagggaagaaaggttgcttttgatggcaagcaggaaagagccatcccaaaactagcttaaataatgagtgcatttttcttcctatatagcaagaagtctggaagtgtgttggctggttgtgtccctctgcaaacaaaggcagcgaggatccagctccttcccactgttctgtgcttctacccttagcatgtggtctttcttatcagtcagccctcattgtctcctggtagcaggtccagggatcacaagtaaatggtgacatctatagaaaaacaaagggaagtttgtcttaaaatgaatctctccatttttttttttaagagccaaaaagcctccagagacttccaggggacgcttatatctccttggccagaattcagtcrcatgcctacttttaaattaatacctgggaaaggagtgagattacaatgactgagttagactatacattctcagtggtggcagaattgccaccgtggtgaccaaaattggttcttggggaygggggatgtgctagtttcctatgctgctattacagatgaccacaaatctagtggctttaaacaagatagatttattatctttcatttctggatgttagaagcccaataattaagggctgtaattaaggtgtgttaattattcagcagagctgtgctcctttcttaatctattttgctctgttttccagcttccagaagctgccagcattccttggctatggtccccttctatcttcaaagccagcaatgatcaagcgagtcttttttttatgatgacctttctcatttatgactcctctgcctcccccttcccaatttaaggacccttgtggttacaatgggcccaccagaatcatctgggatcatcttcctgtctcaaattcagctggatagctaccttarttccatttgcaaccttaattttcctttgcagtgtaacctaccatattcacaggttccagagattagaatgtggatgtctttatggggctgtttttctgtgtaccacagggacaaaaataatcttaggtgttacaatcrtttatgttcctccaaaggacattgtatctgtggaattaaacttttacaggatggggacggaggtttgggagtacttaaggaaaaaaaaatacctacgaagtctccattgggggcctttttgtttgataaatactgggtataactaactaaactgagattcaccagttgggctctggcagggccaatgtatcccgaggcaaatggccactgccaaccagtagtccctgaggaagaaaaaaggggaaacagctactgggtctacagtaggtaggatttgctctaggggagttgtttgaagctgaggcagggtagagaaagggtaatcggctggcatgaactttggcagggaagatgtcatgcaaaatccagttggtttctgtagctgttagcttttcctcactgctattttctatttgtttttatctttaaataaaggaaatgatgaaatatctatccttagaaggcatcaaagtttgattgtcattaactttaaaaaatacayggctgggcgtrgtggctcacgcctgtaatcccagcactttgggaggctgaggtgggtggatcatctggggtcaggagttcgagaccatcctgacccatatggtgaaaccccaactctactgaaaatacaaaattagccaggcgtggtgatgggtgcctgtaatcccatctactcgggaggctgaggcaggagaatcacttgaacctgggaggcagagaggttgcagtaagcggagatcataccactgcactccagcctgagagacagagcaagactctgtctcagaaaaagaaagaaagaaaaaaraaacacaaagcccacatgtatatataaataaatgtcattgcctaatacttcaattatgcttatatatcatggttggatggcttgatgtarcagtatctggaagatgagatcaaaattattgattagaagtgttaagttgaaatttcctatttctttcatacatccttttccttatagatgaatgtcaatttttctttctcaccaaccgrttgtttatctagaagttactatttgaaattctattacttaatgaagtgcttacaaagctttggaaaattactcctaattctaaaataattataccacgtatccttagtcaagaaaaattggcattyatgtgtgctttagcaatatttagataggctgttacatttcttcctttaaaatagccctgattgcaatgcaaattgaaagctgtgatgccatcactgaaaactgggatggggaccatcttctcaggttgatatcctctgtcgacaatgggtgtctctaagagccatgttgagtcatctttggatcttcacactaagtgtggtcttttcaaccaaggctgtaccgtgcatcatcatatagtcatccccatgacatttgtaccttctctaacaagagttatgattgccctcagctatcatgataatcgccactcttctgtcaggcttgatactaagattggaggagctgctctgaagrttcagtttcattctacaaggattattaaacaccaattctatgccaggaactgtgctagaggagctaaaagggaatgatctatgctgctaagcggctatggtctaacaaggtagacggatggtaggacggtggtgtgtaaaaagtgtcatgaaagcacagatggaggagtggaaagagggaccaggaaaggctgccaggggaggtgacattccatctggatcttgttagtgcaaccgaagtaagaaaatgctattttaaactattgccackttctaaggagggtggaaagaatttggatatgcctaggactgtagttggtatttgaatagacatggctatagccaagtcactatagatcagggtttcccaacctacagccttctcaactctgtgacatttgaggccagataatttgctgttgtaggacctgtcctgtgcattgcaggatgtttaccagcatccctggcctcgacctactacatgtcaakttccggtacctcctcactgaaacaaccaaaaatgtcttgagatattgttaaatgttcccccgtgaacaaaatcccctccagttgagagttgctacttctaagtagtagaacaagaaggatacagaatctcaagcaatcttgaaaggaggagaaagggggagcaagataatgagaaagaagagtaaaaataagttaagaagatggtaaaacttgagttaccaagggggttgttacctggcagagaacgtaattaaaaaatgggcatrtctactggtcagttcraagtggtttgttttaatgcaaactgactctatatctcatactctcgtattcacagtggccctgtgtgggtggtttttattttgttttggttaggagtctttggaaggggtttgattttcacatatgatataggacagagaatgtcaccttcaccccagtagctaggctataactagaacttgtgttagaaaaggagcttagaagcacacaaggctggaacctgctctggaaatcacagcaatttgggggaagttcatggatgcacatgaagaacaaattaaggtttaggggaatacagtttaaatttcaaggaaggaagagattctggttgagatctgggttacatgggaaagaacaagccagttagagaaatattacttatgaaaactcctgacatttgcttggctgaacaccagagagagggctagagtgaatacctgggctctcygaagacctcttgaagctcttattccagcacagttgccctgctcagcacagatacagacacatactcacacagacacatctgcacacacactccattgaagacctrgacttaggaaaataatatggaaataatatgggacacacagtaacgaaggctataaagggagaacagcacatacatatggggtgcaggtagtggtcgaaggattggactggctcacccttgggctctgtgtgaccctggaagtcattccatctctctggactttagtttcttcctcattaatggctttgattggcctaaattgtccactgtttaaccacagacagctctaaaatactgtgaatccctgagaatgataaggcataactgacgtgacttctgttctccacttgggcagtccttacttagaagggcatttgtttatagagtttgagccagaccagcccaatgaatgccaaagccagttttggaatggacacgatggccaagagcagagcaaatggccctgtwacagcttggggctctagtcagccaccagattcctgggcggtccctaccaggtcttgctcttcagggactccttaaagggcattaagatctgggtgtygtcattggaggaaacttaaggaataaargagaagaatggaggaaacttaggaataaaagagaagaatgggaaaccacttccacgtcaggcgctaatcctcctgagcagcttcctgcctcatcccagccttggggactctctctgttctttctgctttcctgggctcaaagcctcactccttttagtaactattcattgctgataatgatgaatgaaaactgaccttctcccccagatactctgagtgtttgctgtgctctcaagatggatctgaacatggaacagaaatagagggcttctgtttaatgtatattacagcattaaaagtctatttgcctcatttttytttccttgtcctcaggttatccatccctgtttgggattcagggctgccttcatgaatgttttgctatactatgtcaagttgtttaccaatttctgcttctaatgcagctgtcagatgctcaaactgtctattagtcgaagaggctctctactgaccacctttctcaagtttcttcttcttacatacaatgtttttgacaagactaagcatatcaaaccatcttttaacaattgtaaagcctaatattggccagcatacaattcaattcattaaacattgtagcactgtctctgtgtcaggccttctgctgggtgctcttgggtggtataaaggtgaataagatagggagtcattcgcctaactaatgctacccttgtcagtgaaactggtgggagcttgggagacaggtatgggtgagcaggctgttttgccctctttctttcaggatcccagtgaacattagcccaaccaggtggttagtgctggctattcacatgccttcctctccctcccccaataatgggaagaatccccttggcaggtggctcaaaaacaggtctggactatgtcataaattagattcaacagcttcttggctggcttcgtaggccactactactccctccacattatcccattcaaaaccaaagaaggtagatttatatcatggataataagacaagtgtccttatttattcctgatttctctgttgttagatgtacctccccccgaccccctgccccacatatacttcgccctgactaaaagtttaaaattccaactaaaactaatttatgaatgcatttatcaagtaaatattttagtgtattkctatcaattttattttttgtaatcacttccattttactaaactatgaatrtagccaaattttctgtagtggtccattagctaagtaattgtgggaaatatgtaattataaaggacttaaagtaatgctacattttgtggaaaacactatttgttacctgtgattaactgggtaacctatagattgagcttaaagcctcacctggtgaacctataagatcctggctgccamcatcccatctcccacctttacccctgagatctttactaggaacttaactatggacagcatttcttaccacagaaatctctgggaaaataaaataagcctttwtacaaaatgagtaagactcctacataaaatgtggctgtctataggaaggaaacacacctataactctgagaatgaaattagtttcaagaatacacaaaggatgaagccagtcttctgttggaatactctgcttgggagactgcttgtaaatgagacactcatgaacacctgaggagcatcttaaaatccaaagttttcaatcaagagatcagggtgagccctaggcagggcttgactstgtcagtgaatccaactatccagctgtggcaggaggaaggcactaacttatccaagaggaggtgccagcaagagatattatcagtctagcttttaaaagggggagtggtgagcatatagaaggcagttgattaatatccagcactgttaggagacagggccaggagactggatgaaatattttggtcttacaggcaaagcarcttgtataatggggaaggatgctttgggttatctcgagaggcatgtctgaaaatcatcttctcatttcaaatgatagcrtgggttattgtgagccagttccaaggtggctagcaaaattgagttgctggatatacaaagctgagactcatcacctagaacagggcaagtggggacatctcagaagctctgtccccagaggaggagcagccccctgcctcattcttttccagtacacatattgtgaccctctgctgtccttgtcctttgcctatattgcacaatttcctgctcagatgtgatgggtgaatgaaaattggaaatgtaaaacattgactatgtggaattaaattttcatgaatgacaaaaagactgagttttacactgaagtccccagtagccacccctaccccaataatgttgcccatgttctagattataatcaacagaatactattttattgctaccttctattatttaaaagtttaaaattgtttggaatatcagattaattcaggatactattgtattgccatctgggcttatcagtagcaactacttccatttccaagtcttattaagcaaaacacattacagcaatttgtatgtgaaacattacagcactactaaaacttctataatgctgaaaacacaagttaaatgaaaggatactcctttggttacctaaggtttgattaatgtttcagtcttgtctgtagaaggattttcaaggacaaaaactccttacaaaaacttcaaactatttaagagccaatgactcatattcarcaggactttctgtctagttggaggagcacagtcttattatatatataaaaatgtstgaaaaaagctggttgcaatctagwggatcctctggggctgggtctctcttcgagccctccatctggtggcttgctcccacctcatgattcgtgagaacctgagtggctcctaaaacttgaacttcaaatgactcatgctgtttctattaatttgcggggtcagttttagtttcatagactttgggaaagccaagccaatcagcctgtggagttagacaaaataataatcattcccctgactaataaaggtccccacaccattggggggtaataaacgagtcttgtgggtgatgcagagaacagagcctgtactttcattttcctgaaagagtaagtggaagcttctcagctagtaatccctgacccctctaaaagtatctgtcttcycaaaacctgcaaccattataagcatcctgaaggatcatcttcagggtttcactgatggggcgcagatcatctctctgtacttactcatctgccccctttgcagtcatggaccattactccrctcttctgttcatgggttcagagtgatccagaggcactggccttctgccctgcatgccttttgtgtggctgayccttcctggcttttaagcaattttctaggtccctccagtacttagaagtttgatccctctcaaaggtctgctcagtgggctggaatcgggtggtgtttgttcctgccttctgggcagaggaaggcgttcttcctacagctgtggcggtgatgackgactctccttctcatttccccttcactttctctcccctcctctgagagtttttcctgtagaatactactttttgaagaaaaaggraaaagggaaaaggaagcgaggatggccttttttgaagaaagaaaaaaaaaaagaaagagaggtgggctagctttgtctctcctggtgccttgtcaaaataaaaaaaagtgaactagaacagtgtctgaccttatcttgcccatcttcaagaactccctaaaaataatgtttaagatgtatcatgtgggttggaaaaacacctacagctttctctccccaaattgaacatcctttgtgtttctctgtttctaggtagcactctattttcactcattcactcattccatcttactgaattaatatttttaagtgccccgatttgtgtgttgarccagatgctgcaaaaaaaaaaaaaaaagtataatatgakggttcagcatttagtgctggcaggatgggcaacaaacagacataaaattctcatgaaacagtggaagaaagcataagtttgagaacaaatgatgcagatataaatgctaaaaagtttcagagatcaatataatctggagtggttgggaaaaaawaatccacaaacacagtgagaccttggagaaccttaaaggccaggctgaagatcatattttattctacagataatgggaaacttttaggaaatatgttagcagtctcagagatcctattggaagaggggcgcacataagaactctttgtgggtatgaaagaactggctcagtaaaatgtgaatggagagtttgtgcagatagggagagcttctgacaccctcaaatgcaagtatgaggaaaatgaagggagaatgcttgctgagctgagactacagggtagttgggtgtacagggtgatgtttgggtgaaccaggtgtgcacaggcaaggaaacackatatattacacagaatggtggaagctagttgtctatgcctgaaaacagcataaacctcaccatgtctcrgtgggaagaagagcggcactgaagacagcttgagtaagaactgagcaatcaaagsgaatggagagaaactggagttcagggggtaatttcagtggtrtcagtggcattccacatagcaaarctgggcatgtgggagtagagagggaaaatactgaaagcaaagatacctatttctatttttaccatactgaatttcagttgggggtctgatattcagtttgaaaatcttgagtggagaagaggccagttggatttatttctggcaaaaaaaaatatgtatatatagaaaagatcaactatgaacctcaaccatgtcaccatatttttaatctattaatttgatttgcattcagagaccacattatcttttgagttacagtgtttcctattatctatgaactgacctctacaaataagaagagaaataggaraaacgtctgagttgccaggaagggttatttccacctagcttttgatccagtccgaccaactaatgaatcccccgtcaggggctaataaaggaggcttgttgtgagtgatgcagagaacgtagctctaagtggtcttacattaatgtctgttcaccttcatgcttgactttgagtctaatgacatccatgcacaaagaaggcagggtgaggtggtcttaaatcattatctgaacaccaagtctgtagaaaaaaagtccagttttaagttcattaagggatcctgctgaatactctaggatatcaaattaaccatttgaaaaaaccttttaaagttgagttgaaaaactaggacattttttcaaatcttttgwgattccgttttttgaagtgaataaaactcagagctttttaggtattttttttccccagccacgatgaagagaacattaaaggacatttgcttaaactacatacgtcaagtctaagaagttactttggagaaataacttctttggcagtgatgttattttctgtgaaatagtaaggatgatctggaacctgggactcagaaaatgccrtttgcagacccagatatttggactagctagacgatttggaaggtaaaacgaaggtacctattctgttacattatttaatgctgttagaaactgaagatgaaatggcctgtttcagaatttttcttaggcaggattataatatttccaaaaagaaaaaattacctttcttctcttacctagtttaatggctagagattatgggctttgaattcagcaagagacasgttccagtcttaactttgctgtcaccagttctaaaaccctgggttattttccaagtttcatcgtctttaacatggggataatcatagtcccttcagttcagaattattgagagagttaaaccaatttatttatacatataatgtgcttgtgagaatacacatggtgatagctcttaattttcactagtaataaaagtcaaaattgaggaaaataatccctgtgctagctcattgttttcaatgagcttctgggacacatcatggtttatggtgacttgaagcgtctttgcttggacaaggtttaggaagagttattggctgtattgacttctatgcattatttcagaaagaactcccaatttctgtcatttttactgttcaaagctggtggtgaactttatctcatcttccatttgatgcctgtgtttgtgatataagtaaaaatcaacttcagaggttttaaagggtagtactcactgttccacctggaaatcatgatttttcttagaaaacaatcaaacacagaggcgctcagaatggggcttgtatataatgatccttatgtagaaacaagcacacttgtcgacagatacacacataagtgagtggatgaattgattgtccaagtkcattttagaatatttcaagtacaaatatcaggttgtctctaccagatatccacttattttagtgaatggtatttttaaagacaagttagatgttgaaagctaaggtaaatttaaaagaaaatgaactgaatgtgcccatcatcctgttactgagattggtaataaatcgtgatgacgaataatttttcaaatttgatagtgacctatttgtttgttttcagataggatattggcagggaaaaaggaaggaaaataattaacatttgttgaacacctactaatgttggacatagcattctacgtttgctattttatgacttctcagaaaatccctgccagttgtgggttatagtacccatttatcaaatgaggaaagtttgtctcagagaggttacaaaactaggatcatacatttaaccagtggaataaacaaatgctcttaatcatgacaccatatttctgcttcatttgtaaaggaatatttatctcctttagtaaaataaatcagcatatagaatatcactaacttttagttctgagagagaaaccttctggtgggaaraggtgaatgtcaacagttctctactttcctcttggggttctctcatctgctttgtcctaagtgtacagtcctcaccctggcagcaagtcatactcgtgaatccctgtctttacaaaagaatttcctacccacaaaggggtgatttctttttttttaaattaaaatatttgttattggccaggcacagtggcttatgcctgtaatcccagcactttgggaggccaaggtaggtggattacttgaggccaggagtcagagaccagcctggccaacatggcaaaactccatctctactaaaaatacaaaaaattagctgggcatgttggtgcatgcctgtaatcccagctacttgggaggctgaggcacgaaaattgcttgaactcacagggtggaggttgtagtgagctgagatcgtgccgtggcactccagcctgggcagcagagtgagacgctgtctttaaataayaaataaaaataaaataatggttacaatggagacaacaatgtgtactggctgcctgtggaaagaggggagagaaactttgtcttccaatgaaaatggttcaatataacagaaaccccaatctgagtaccatatattatgtttataataacgttaaagacttttccttcacaaaagcagggaagccctataattctggtgcgatcctcctctctttatgtcagtgttttagtgggagcttttctctgtccacacatgcttaagtataaagtgatgcatcctggcataaatgaaagaaaaacagctgactggattcagctaacaggagagcacaaagagaagacaggccaggaggataaggtcttcttatcccctcagtaaatatggatattttattcccatattcctcctcactgtgtggtgtaatcatctctactccaagattcagcctgtctcctgctctgggaccaatcttgtcttcagtcggtagttggtaaaaagctttaactgaatactcctgttgctcttgcatcaaggtcttgagtccagctctgaccttgtgctctggcttcagcraggcagcttttctcctgtttctaggaagaaatccttctccatgtgtgccccagttctagttgaaggttttccctcaacctgaccctagagtgactaacctggtttgtctaggactgtcttgrgtttagcaccaaaagtcccatgtctcaggaaatgttgctgtcccatgcatccacaaatggttagttacactgcaagcccccattctgataatgtgcctggaatccccttagcactaggcayggcattcttattgtctcttgctatgtttgaaagctttgaataaattgtcaaatactctggctattgatgagggagttaataaattgaatttggaatgctggctacaagttcccctaaataatgtgattttgactatcaaaccacccacatcttttgagcacagattctaaatgattacaattttgattcataaaagagtttcattaatactagatatttcaggaaattatccttgactaatacgagggatggaaggaatgggggaaaactcaaggctcaccatatcatggtaaattatttatttattgtttatttagtgggaaaggatctgctctgttgtgtgctttcactggtctaaagggatttggcacagttacctaaataggtgtrattataarccatatctccctttgctgttctccctgaatcactagccacctttcccagaactttgtttaaattcaagttttacatgatccttggagtgctrttatttgtaagtaaaaaatttaaataataataataagatgaaaatgaagattattgtaacagtgatttatctaacaagtaaagatggaacctgacatactattctaaattggattgagtttacttttgctataaaagaaatgtcagttttatctaatgacacttttaatttcttgcattgaatgcaggataataccctttaaaacaaaggggagacawttaagcataatgaggaactctcaagagcagattatggaaataaagcattgcttttatctattataggcagtctcagagagagaaacagacaaacctagtaaagactgttccagatagtttcggaaatcaagctaaatattgaatrggcaaaacaaactttcacaaaattagcttacagcaaggcaagtctcctttaagaattttaaataaagagtaattcttgattgggtagaattctgtgtgctgtttacatgaactgtcacatggcaggaatcatttaaaaaaagaatacggcacctgttactaccagatgtgtggcttcctttgctacaggatgatgggtatatgttgcagaaatgctcatgtgtgatttggttcctgagaaacaagcatttttttgctctagaaatggtagtttatgatgctcctcttgaaggttctcatgtgagaactcttggccaccagagggaggtggtcaacaaagatgaagggcaacagggccctcacatgggtaggctgttggtgctgtgtggaatggagagagcctactttagaaagcccgttggcatttgggcctttatcacatcagagtgaatrctggtacaagagacagcacagactgtcgggggagaatctcagctctgccacttaatagctaggcagttttaggcaaaccacttggcctctctgagccctgctgtcctcacttataatacctcattacgttaagtgaaataagccaagaacaaaacattaagcaccacatgttgtcactcatatgtggaagctaaatgattcatctaatcgaagaaaaaagtagagcagaggctagcaaaggctgggaagggtagggggaaaggagacatggggagagatttgttaaagcttacaaaattacagctagctaggaggaataagtttgtgttctctagcactgtaggatgactactgttaataatatacagtttcaaatagaagcaggatattgaatgtttccaatacaaagaaatgataagtatttgagttgatgaatatgctaattacccagatctcatcactatacattctatgtatcacaacatcactatataactcataaatatgtacaattatgtgtcagttaaattaaaaaaaaataaagaatacctttctcacaggtttgatttgagtatcaaatgagataatgtctgagaaagtaccttgtaaactcttaaatgctacacaaaggttaactattttcccataatgtggtttataattgcatgcgtttagatattccrtaagtcacaatgttaccttcaaaacccaaggcctgatatcagttattctgtgacacagatattagtcctctccccaggtataagcattataaaaggttagcactatattaagtaatggatctattgctctactaaattattcatgattatgtgttcagtgagtgattggttggattgaaataatcatcaggtgttctcagggctctggagaagaagctgataaatgacataaggtttcttcaatgtgatgactttgctaccattaaacattaagaaaaaccaattaattgaatcactgtgggaaaaaaagtcatcaaattccaatctggagtgtcaaaggatctgttttttaagtaattattctttttaatacatcaaagcttttcagcaaaagtttcagaatcgtgaatgatttcaatgattttctgaagatcagtttttgagtaagaaagagaaaaattcatttcttttttttacagggaaagacatgttaattttttttaaatgaaagaatgaataggtttggttcattttgaccaggaattttagtagttgttgaaaaggtttgtgctgggaaataggtgcccccaccatctctgtcccagacttcgctggtgggctctgcaactgtggcagtaacaaaagaatgagaattccacttgggcagtctgctgtgatcttgacttgctcacatctaaattaaaccactttccatctccaccaccacagccctctgacatcctcatttttgtcagtagcccaacactcttcttatctttcatcctcaaattatttggagttgtgcttgtctttttagcttccaagcatttctttttttaaaacatttaatttattttaggtttgggggtacatgtgaatgtttgttacagaggtaaacaagtgtcatggggtttgttgtacatactatttcatcacccaggttttaagcccagtacccagtagttatattttctgcatctgtccctcctcccactctctcacctcaagtagcctctagtgtgtgttgttcccttctttgtgttcataaattcttatttagcttccacttataagtgagaacatgtggtatttggttttccattccttcatcagtttgcctaaggataatggcctccagctattgcatgttcccgcaaaaaacatgatctggttcttttttatggctgcataatattccatggtatatatggtactacatttcctttattcaatctgtcattgatggacatttagattgattccacatctttggtattatgaatagtgctgcaatgaaatttattatatgcatgtgtctttatagtagaatgatttatattcctctgggtgtatacccagtaatgggattgctggttagaatggtagttctgcttttagctctttgaggaattgccatactgcttcccacaatggttgaactaatttgcactcccaccaacagtgtataggtgttccctttcctctgcaagcttgccagcctgttgttttttgactttttattaatagccattctgaccggtatgagatggtatctcactgtggttttgattrgtaattctctaatgatcggtgatattgagctttttttcatatccttgttggccacatttatgtcttcttttgagaagtgtctgttcatgtcctttgcccacttttcaatggggttttctcttataaatttgtttaagttccttatagatgtgggatattagacctttgtcagacactaaccttgaatagctaaataccccacttaaaagggacagagtggcaagctggatagaaaagcaagatccaatggtatgctgtcttcaagaaactcatctcatgtgtaatgacactcataggctcaaaataaagagatggaggaaaatctaccaagcaaatagaaaacagaaaaaagcaggagttgtaatcccaatttcaaacaaaacagatttcaaaccaacraagaataaaaaaaggcaaagaagggcattacaaaatggtaaagggttcaattcaacaaaaagacctaacctaagtatatatacactcaacacaggaacacccagattcatgaagcaagttcttagagacccacagagacatagacttctgtgcaataatagtgaaaaacttcaacattttactgacagtattagagagttcatcaaggcagaaaattaacaaagatattcaagacctaaactcarcattggaccaaatggatattatagaccttcacagaactttccacctaaaacaatagaatatacattcttctcattgccaaatggcacatactctaaaatcaaccacataattggacataaaataatcctcaacaaatgtaaaggaactgaaataataccaaacacactctcagacaatagcacaataaaaatagaaagtcaagactttgaaaatcactcaaagccatccaattaaatggaaattaaacaacatgctcctgaatgacttttgggtaaatagtgaaattaaggcagaaattaagaagttctttgaaaataatgagaacaaacaacatactggaatctctgggacacagctaaggtagttttaagagggaaattcatagcactaaatgcccatgtcaaaaagatctcaaattaaaaacttaatttcacaactgcaagaattagagaaagaataaatccaccccaaagctagcagaagatgagaaataacaaaaatcagagctgaactgaagaaaatggagacatgagaaaccatgagtttatttatttattttttctttttgtttgtttttgagacagagtcttactstgtcacccaggttggagtgcagtggtgcaatctctgctcactacaacctccgcctccctggttgaagtgatcctattgcctcagcctcccatrtagctggaattacaggtgcctgccaccacaagtggctaatttttgtatttttagtagrgacagggttttaccatgttggctgggctgctctcaaactcctgacctcaagtgatttgcccaccttggcctccctaagtgctgggattacaggcatgagccatggcacctggcctggcttaggagttgcttttttgtttgtttgtttgtttgtttgtttttgatggagtctcactctgtcatccgggctggagtgcagtggcgtgatctcggctcactgcaagctctgcctcctgggttcacgccattctcctgcctcagcctcctgagtagccaggactacaggtgcctgccaccatgtctggctaattttttgtatgtttttgtagaaacggggtttcaccgtgttagccagcatggtcttgatctcctgactttgtgatccatctgcctcagcctcccaaagtgctgggattacaggtgtgagccaccacacccagcaggagtcggttttgtgggaaaaaaattaataaaatagataggccactagctagagtaataaagaagataagaaaggagatccaaataagcataattggaaatgatgaagggaatattactgctgacccccacagatataaaagcaaccatcagaaactactgtgaacacctctacacacacaaactgcaaaacctagaagcagtggataaatttctggacaattacaccctcccaagactgatctaggaataaaatrattccctgaacagaccaaaagccagctctaaaattgaatctaataaatagcctaccaaccaaaaaaagcccaggacctgatggattcactgtcaaattctaccagatatataaagaaaagtaccaaccattcctacagtatttcttatatacaatgtgttcacaagtcctgacatttattttgctgaaaacatctctggttggactcttacacccccatgtcccctgacaccagctgaaccccagctttcatgcttgcagtgtcatggtggccctgactcctggaattcctccaattsctcctgaatccttctacagkgctgcttttattacaccattccttcttttataaatggcaatgactccctattgcatgctgtgtcaagccagctcctctcttggtgtatcctttttagtcatgtttgtttccccagatttgctgggatcctcctgcacacctggcttcaccagcttagctatctgccttttccccacatgatctctttgtctgaattacctggaattagcctttcgtcttcttttctttctttctctctccttttttttttttttgatggagtcttgctctgttgcccaggctggagtgcagtggcacgatatcggctcactgcaacctctgcctcctgggttcaagcaattctcctgcctcagcctcctgagtagccgggattacaggcacacatcaccacgcctggcagcctttcttctgtaggaaattttggatgatccagcatcaaggaggtcaagaagctgctttgaaaattgagattcaccaactttaacttaaatttaggattctttaattaatcagtctggggctctcctatagtgtgaaaaataaagaacatccagtatggaagtacagtagactatttacattctggtgggaaaagtatccttcccaactttagcatctgcaggcctgaattgagcagtgacaagatagacactgagatgacattaataaagtcctgtcatcagtaacgatagcagagagatatcagtcaacaccccagatggtagaggaagatctggaaacacagtagaacttgagcttccacaagcatcagcagggggaggaagggtgtgggggaaaggaagataaaggtggagatgaatattctgctgcaggggccccaaagccagaaattattgattaaattggtagcttgatctgtgcccattcacctagtaaccatgggaaaataagttgggttaattttaaaataataatgcccagttcatagagacacttgaaaatgttaatgtatttttttggttaaaaatgatgagctatcagattaattcaaacagctgaatgttgtagtttgtattagttaataattgtattccttttcaagatcattaaataagtaactgmacgaaatgagataacatatgtaaatcacctagcacaatttctagtagctagcatagtccttaataagcaggagtacttttaccccttcctttctgtgaattcaatgatttaaagaaaattattcatgtaagtaaataaagtttaatgtctctctgtggatattttgcttcagttcatgtgaatcttaggagtcctaaagaagtagaagaaaagctatggggacagaaagaataagtgcagttgtttgttatacctgtctcaggtatacaaggtaggtgtgcaacatggaggcaggcaagtttcatatgaacatgttcagccccactttcagggccaccctatcactatataactggacacatttgcacaaatgtgtccctatttgaaaaagcaaatatgtggaaccctgaacttgctaagtaggcaaatgatgggtgattattctactacaaaagattctttgctctgaaagacacaaaatgagttaaatttttttttttttgctacatgcatctgttgcttaaattctatctagatgaaaagtacattaatatacagctgactaaatctgcaaaaactaggaatttctcatgttgctattcttgtttatcttctggatttggaatttaaaaaaggcatgccatacttataattcttaaagaaacaaatcttaagaagttcactaactccatattggactgttatatatcattgggttcctattttcagcagatattctgcctatattttctgtattccatttactaaatatatcacttattcaagcaaatttcatattgtatcttgtttcttactatcctattcatgataaaattttgtataaactatcagtgaaaaaggattgttatttgaaaactttttctctctttctgtaaccaaattattacttattgcatgtcttttggagtgtaggtactagtactcttctttgtatcattttataaaatatatatgttaatgaatatatatgtgtatatatcatatatgagtatttatttggccatacattaaagattcaaagccatacattaaatattttatcaagtttaaataattgctctcataacctctaaaaagatatgtgtttgtctagcttaaaagtgacattttaraaacttgtttgaaaacttgcctttcgatgtcatgtaattctcagaaagatgaagtcttttaggactgaaatcccctcaagtttttattcttttgttatgtctagtttctaaacacctcttgaggattatggtagctgtagaaaatgtctaccagtgactttcatgtggggcttaatgtcagaatatataaccacttatcattggctgggctgaagtgtttttccagtgcttgttttaaaaggtgaatcagcagcagggatattcctaatccatctttatgtacacaccagaagagawgttgccaaggtttttatggctagtcagatgctttcaagaaagtacaagtggctttgattttcagtttttatttggttacaaagagagaaggaacatatttggtctcatggatggaaaatgctcctacaagaaaactccactgcattgatgcagcrtattcatgagttatctagaggctatttgtaattatgatgaaggattatggtaatatgagtgtgagtcagtacctcttaaaaatcatttatatgggccgggcrcggtggctcatgcctgtcatcccagcactttgggaggccaaggcgggtgcaatcacaaggtcaggagttagagaccagcctgaccaatagggtgaaacctggtctctactaaaaatacaaaaattagctgggtgtggtggcgtgcacctgtaattccagctactcaggaggctgaggcaggagaatcgcttgaacccaggaggyggaggttgcagtgagctgagattgcgccactgcactccagcctgggtgacagagcaagactccatctcaaaaaaaacaaaaaaaaaaaaagcaaaaaaaaaaaatttatatgaaccaatcattttgagaaaacatctacaaaatgacggatttagtctaatactttggtgtctcccacatgtccaacttgtccaattcttgcatttgaatgtggaatttttttcttctctgcctattcatttttcaagatacaaaaatatgttctctcccctataggatcttcttggcaaccctagattatcctttccttttctgagtcctcagaacactctgtcatatcatcattagagcccttagcaggttgtcttgaaatctgttgctcacttgyctcccttattgctctgtgagcacctcaaggtgacactgtttcttctgtttcatctgagcccttgtacctagaacagtgtctggcacacagcaaatgaactaatgaaagagaggtcacacactgacagtctgcacaaaccgcccattatgtttaatgaactggtaactacatatttttggaagagttcataagttaattcagataacattcagataaatgtttcatccaaatgcccaggtttatcatagttgctaacacggagactctgcttgtcaccaagcctgtgatggcaaaaggccctctctcacagctttcaacacmccctccagccttatataaatgtctgtagtcaaaactattgactggatctgcctcctatcctccattacttgctatttcagaatgttatagaagaggaatgttgtggtgaaggaaaacaatttgaggaaggtggacattgagggcaagaaattagaaacaaattaattttttttttcaccagcctaaatatgatcctattttagggcctgggaaaaaaaggaggaactaacatttataaatgtttatctttaaaatgggattcaagtgtaactagttatggggcaaggtgagtaacaagccatgaaatctatccccgtgaaaactatttcctccaactctaagctgtaactttcaaattctcctaatttgagatctaggaagttttaatagaccaggaaatgatttgtccagttgckgttctcgcctaccaaccaggagtgtgttgacaagaacaaagagaaactttaaagctctcttgcccttcctggggccaggctgtggggagtgctgatgaatttaatttgatgatattatgccatgacattgtgtcaatatgcgatgatgtgttgtgatggcacagcgtcatcacgtggtgacgcaacatcatgacgtaagacgtcacaacgccagttaaagacgtgattccagaagggtttttaaactgagcaacaaatctacaattatttaactaaaagcttgagattttagaaaggcagctgaactataaattacaggttagaaaatgtttctttgcatgaattatggctctttttaaatttgtatatggctccttctagaaattgtaacctctgttcttgcaaggcagctttagaaatcaaaatataatttcatttaatagactgtttctatcacaagttttccctrtattaggtttttttttttgtgggatatgagctggtgctaaatttaaacataatttcacaatgagatttagaaaatataatcttttaatttgcatatttgttaaaaattatttagtgcctcatagagygccaggtaaratgatttataattgaaattacattgtaactaatrtcttttctgggcatacattttataayaataatcttgcactcagattttaataatagagatrtgttaaaaaggagaaatgattttcaaatatgttttactttgtatatgtgtgaaatcttggaaaaacctttatatgttttgtgcctcagttctaccatctttaaaatgatgaggatgctttttttttcttgtttttatagsgatattgtatggacaaactatatgatgtatgcaaatgttgtttggaamaaatgttgttatataaatctaggttactattaaataccttctccagagctacatagactctactcatgaacttgaaatccagtggggaaacatttgttagactagaaccaagatggatttkatgtttgattcttcatcttaacttttccctctgattgcttcatttctagatttacatgtttrgaaatgagttatgctgaagtatataagacagtggcataaaaatatttttgatatttaaagttttggtaactctttctcttctgtaaacgtggatataaagstgtatgtttctcactggtgaaaggaactttacaatccacattagggtgaatataatttgagcaaaarttcaaattttttttttcactcatatgtagctttgtcagttcacaatccagagaatactggaaaagtctgaagtgtcacaaagctgcttcactacatttaattttctgtggtgaagtgaggagattgctttgttgttttaaaattcacttttgctttatcactccttctgcaactccagtaaaaatgtaccaaaatttcatgtctcctgaaagtgatacatgactttttgatggaatttgaaatggtggttgattacttttgaatacttaagctccaccggttgacagctcacatctrcagaaaaacaattagcaaatttgtgaattatcrttggtttacacattaaacaagcaaagtaattctttataacgttaaccaacaggctgtgtcttgattacaggatattgttkttcattaataaatggagctatttttagattttgccggtgtgtatacattttacttgcttgcttttcatatctcagtcaccattatgtgscagtctccaggaccacctgcataatctgtggggcccagtgttcaaaaattattgacacttttaagacattgacagtagatcattagctaagtgtacctcccttctgtgtacaggccctgggcagctgctcaggttgtgcacccatgcagacctgccaggcatgtcatgaatttggcagctttggatttmatgtgcttctacagtttatggcctgtttgtgtgatctcctgcttctttaaggttrgttttggactacttacttacttttatctctttctagrtaatagtttacttataatattacttttatctctttctagataataattactttgtgttggctgggaatgatctatggccatttcttgcttatctgtactcaagaataatgtagagcaacatatcatcaaaaatttcctgaaataacttaaattaatgaaacctaatttaaacttggggaatgcctagttcaaaggaaagctgaattaaacaaaattttaataactttattattttcaagtgtgtgtagtattcagtaaggactgctagcaaggacttataactgytcagtcatacctgagctgagttaaagaatgggtcattgagaaattgggaagatttatttgtacagaartcataagctatttatttttaatggtgtgtttttttgactttggttgtaaggtcaagcttcctcccagaatcttgtttaccctagcaattyacttcgcaaacttttttttttccccttagagatagcaaaccttgatcctattttcttctgcattgttacacatttgaaayagtagaatctgagctaatgagggctttggtgttttttccaccttgataagaagcatatgtgtgttatgtgagtgtgtgtgtgtgtrkatataaatatttggggatgggtagcagattggacttcacaccatatcttgctgagaccgttagtaatgtgaataagtcttttgcaatcacctttcttttaggccatttgtagattatggatttattttctttcaggtttgcaagagacctcaaaattcattcagacaaagctcccactagtgacttaattccctatacaatattctactaatyggttgttcagccttttgtccctctacccaacatgggagaactcacattctgataagtccataccatatatttctttattgtgccaagtcacaatctcctttatttgagcgtattaattctcatttgacctctttggatccttcagatgaagactattttcattccatagactacctaaaaaatatttaaagatagatgccatgtccttctttagttttcttttctgtagacgaaaaacatcatttaaaaaaatgttcccttcttctggtataagaaattgaatatccagtttgtctgtttctttaaggttcaacaccaaaatccatctgcagcatggaattaagttatctttggcaaggagagcaggcctataatctcacctctctgagaaaattttatttctattattacagaaatttcttgtttctattattgtacctaaaggtggtatagcttatgggtagtcataccatatggttggttcatattgaatttattgccaaccaaagtttctatgtttctgtctaggtagctgccaactattttttttttttagcattctgcacttgagaattattatttttgatcttatgattatctctgttaaattttgatttgttcaacttgacccatatctgtacactaccatatctattttggtttatacaacctatttattatcccactcagtgtttttgtcttaacatttttaggaccttgttttctatctaagccattgataatatttgagaacagaaagaggtccagaacagaatcctgtggctcaattctttttccaggttgaggttcttctcttattcactagccttttgggtacaaatgttcaacgagttactagttgcgctaacatccagtctacatttttccatcttttctgtttgggtatgttgttttctgttttctgtcagaygttttgctgtaatgcaatgcrtattattgactgcrttttataaccaaacagactaataaccccctcaaagaaagttatgaggttgatgtacataatatgatatattaagcagtttagtgggataaaataggtaccacaaataatttccaaagtcagtcattcacaggtagtaaagtcaactgtatttatttaaataagaataaggtctggatggatcccactaagtaattctcattttgggccctcattattttagttttgagttagttttttaatcagcagcgaggcacatcataacagtgaatagtaagaaatttcaggggagtactaaggaagaaatataaagttgtaggtcaatgtygaatgcctgttagaagtaattagatatacaagggtgaagctcttataaaattaatttacaaagcatatgtctatcttttgggtattaatattatcactgagatgggccaagtcagacttagaatcctgactcgkatttagtagtactgtaaacctataccagttaagaagtatctacctctcagagttactgtaaggattaaaagagaaattgtcrtttaatgtcactagcatagtatatcaaatagtatgaacttaaaatgaatcctgttaattcagtaagtattaactgtatgctgttatgtgccagatattgggaattttttgtataataaccaagatgaaatgtatatyccccccccccccyttttttttttgagacagagtctcgctctgtcactcaggttagagtgtaatggtrtggtcttagctcactgcaacctctgcctcccaggttcargtgattctcctgcctcagcctcctgagtagctggaactacaggcaccygccactacgcctagctaatttttgtatttttaggagagacrgggtttctccatgttggtcaggctggtcttgaactcctgaccttgtgatccgcctgccacggcctcccaaagtgccgggattacaggcatgagccactgcatccagccccttctgttaaatgaaatacacatatatgtatataatcaatataagtaagtataaacacacacatatacacactgcattgaatctagcttgcatctcattaatgagtttatcatttctcaaccaaaagagttcaaaacttagactgagactggccacaatgccagatcaatggatttgttaggtcattccatagaaccaaggggtttcaaagatggggagaccttgtaaataacaaagtccattttgtctatatcatagattaggaaactgaagccaagagatgttgaatgatttcctaaaaccacttagtcagtgaattttagagctaaaaccatacattaaatatgtttcctaccatatcacactcaccaagtgcctaaaaaggagyatggaaccctcaagcktgtgatatggtgtcacaaatcacaaggtagaagatgccattttaacttggtctgctgatttgagtgtgcaaattagtaaaacttaaaaatacatattgatggtgagtatattttttgtacatwggaaatattttgtagtaaataataaattagtcaaaatcagtcgccctttgtaggcatagttcatcaatattatgatgttaatattgttgaaatgactgagcacattcaaagacagaatctacaaactagcctatttggaaagggaattgcctatgtaagtcrtaacttgagggaagatcaaaggaatcagttcctaaacatgagaaactaagctttctttcattgaaaaagctagttagttgtattgaatcatatctaatgttggggtgagcgataaggagatagaggtgatgcctaaagagtaggaataaagtagtgaacattgctgtaatgttgatttgaaattctctttcacttagtgaaattcattgctcagggaaaagattctccttcaaggaaaggttgcttgcaaattcaaggtcattttctaaatcctacactgcttgtctatgtaccaaacttttctggttttatttttattctctttgtcttaaaatatatcttcaaacacaggttctacaattcctgctttgtgatgtgttattagtccccagcccatttgctggggycattgtaaacaaggggctattaaggtagacagctggacagggaacaactactgagaaggttgttgcctatgcatagaggggataaagagaagrggctaagagtatttctatttgagcaccaatatatattgaagagggtgcaagaggcagagagcttcagaggtcactgaactcagccccttctattttgcaaatgggaaatgaaggcccagagagagaaagtaatctgcccaacaccaaagagctaacacaaaattgggtttacaactcggataaattgatagcagactccaactgatttttttttcttatcaaaaattttcatgaaacattttaactatacagaaaaatacatcaagtcatataagaaacccatgtgtaactattccctttctccccaggtcacatcttaaccaattgctatattttctttagatatttgaagaaataaaatgggtaaagccccatgaatacacatccctgattccccttcttcctctttcctaagggctatgtatcattcttatgcatgcctttatgattttactacatgtgggcatgccacaaacaatattcagtattgttcagcatgttataaatactatataaatgttatcaaaatgtatgcattgttttataacctgcytttttttttttttttttttttttttkctcaacattatgtttttgaratttctctgtgttgatacatggaactccagtttattcattgtaactgtgagtagtatttctatgcacaaatatgtcacaatttgttaatttgtatttggwtaatttttcattgttggaaatggtgccataattaacaaaaagaatgtatatrtagttgtttttgcactggtgtgagtttcttcagatctgagtttttctgctggtggatcatgaaaaggttayggtgagctgctcaggccaacacaaatagggtctggggcaagcctctggcagccttatccacttaacatggggtattgtacaaatgccatcattttctcttttgtttaaacttttattttaggttcagggtacgtgtgcaggtttttttttgccacgaagggaaaaggttgggaaacactgctgaagaagtggttctcaatcttaacatgtatcaraatcaactggagggcttattaaaaagactgttgagtttcactccctgaatttctgattctgtacacccagagtggggcccaggtgtttgcattttaacaaatcccaagtggggaccacctttcagagccactaaggcatctatctaggagttgacttgtgggttccaattgactattcaaatacattttcattattgcaaatattgtattataattagtatatcatataataaatctggaatataatttaaaaatagaaatgattgataggattcaaaaatctactagcttggaatttgcaagcttttgtgtgagagaaagatggagagcatttaattatgctcagaaataacttccctataattgcaaattctgtgttcctttttgwgtgtgcaaaccaggacaaggactttaaaaagataattatatgagaaaagcagtcattccttcttttccctcttatctttatggtgtaatcaataggtctaccaccattcaccaaggaagaaaaagtaaaaarggaaatgttacaattagaacgtcatcggctctctgcaaaagttgcagagttatcagaatgtgtctttgatgcacaactcttttgggtcagtgtgtgtctattgaagttcactctcactcctgtgcctcccattgcatgcttcggcttctctggacacctctgccttcagaactttccttccccttccgtctccccttctcaaagggcatctgtttctctctccttgaaaagatgacactccatttataccttcagtaaaaagagaccaatgaaataaaatcttttgcaataaacaattcaggttggtagggagaattggtgctggaatggaccttcactcctacctctacctctaaaacacacttgaaatggattcgtacctggtgtgaagtagcatttcctccatggttccagtcttctgaatggtcttggtaccctccctgtccgaaaatgagggctccttatcagctcctgctgttcacacatcccccacgcacagtcagtccctgttgacttgaaactgttcaccttcatctaccctgtctctgcttctgtccagatcactgcacttctcatctgggtgattgcaatggccttctaaatgtgctccattcttgttcccttccagtccattcttcacatagtggccagactgacctttaaaaaataagagctaaatatgccattctactgctaaaaatccttcctaagtggcatctcattgtcctcaaagttaaatccatatctttcagccctacctgacctggcccttgcctgtctccagcatcactttatgtggcacccaccttgtgctgctttccaccacgcacaccagactcccccacttcttctttctcctaaggcattggattctcctctatcaagcacaagcccttctctttccttgagaagttctttcctccctcactgctttgctcttctccttgataacctgtacccgtccttcaagtggagcttaagcatcacttccatggggctgtcttctgtgaccatcgtccctccaccatgctggcctggctttgctcccatgttaagaacagctctacatcttccctccttctcatggctctcctaatacttctaagtatttattgtttggtttccctactaggctataagcttaatgaggatgggaatccttgcccatttattcttagcactgaatccccaagacctaagattgtgcctaggrgccatttaataattgcaataaatatttgtggctggttgatataaattattgactgcatttccacatatggattgcacacacatatgtatgtgtttgaatttctcaacatcatttacttgtaaacctgcgtcagtgtgcatggtttacaaactcaacacgaataaactggagatcaaatttgtatgactttcttttatgttgtttaacataragccacccagtttgtcactgaagaatatacagaaatatttcattagtaaatccttccatatatattatcattcttgccagtaatgttgctcctctgtgtgtgtgtgtatgtgtatgtttaacagagagagagatgatttttctagacctactaaaattatgatggaagatatttacagtgtgcaagatgagatttgaacatggaatctacctatcagtcagcaggcttaaaaaagaagattcaacactccagtcatgaagtgtcttttaaagaatataatttgaaactctatgggagaataagaatataatggcgagcctctagttcctagggctagagtaaataaattcccaagtctrtaggtttatttgaagcaaatctaatacgtgaaaacttaggggcttttatccataagccattcaagaacaaaatccaggagtctggaactatagcatccaactagttttttattttagaagtatgatttatctaaaaattcataaaatataaaatatacatgattagtctaaaatcatgaaactcttaattataatatcatacattaaawagtttatgaagcattttcacaaggtgaaatccaaactagtctaacttcagataccaacctttgaccttggatggactctaggtttaaaaccagctctgctttatattagctgtgtgacttggcaagttatttaaacttccacatcttactttctgcatctggaagaagggcatagtatatatcttatccaactgctgagagattaaatgacgtgaattcttctcaatactgccatggcctcttgaatggctttgcagtttctataaactgtactcaccacaatggccaaaggtaagcctttaaaaatctgccagaccaccttattcctctgtttaaaatctttcagtggcttctcattttggtcagagtaaagcccaccagggcctctgcaatctggtctccataacctctctgatctcacctcctattctctctgcttcatctgtcccagctatcccaatctccctgccattgcctggacacaccaggaatgctcctgccatgggcttgggggttcatgctctcacctttttgaaatctttgtttagatggcacctttgcaaagaggcctgctgaatatcctttacamaactgtagttctttcccctccccttcccgcttaccattttctgtgtgttccttttttcatcacttactatttgctctatttttattgttcatttccctcaattagaatgtaagcttcccaagggcaggaatcattgtttgttcactgttatatttcagacacctagaacagtgccttgcaaatagcattcaatagatgtttgttgagcaaatgaattttaaagtaacttagtaaagcacctagctatatattggttatcactacatattgaaaaaaatgttggacagttttattgtttatttaatcaaaggaagatattttgcattgcttttttattttttattttttgaaacagggtctcattttgtcacccaggctatgtgtagtggtgtgatcactgctcactacagccttaacctcaacctctggkkctcatgtgattctcctacctcagctgctccagtagctggcactataggtatgaatcaccatgcctggctaagtgtttctgttttttgtagagatgagatttcactatgttgttcaggctggtctcagactcctgggctcaatctgatactcctgcctcagcctcctaaagtgctggattataggcatgagccactgcatctggactgcattgctttttaaaagtgtagaatggcaaggggaaaaaaaggagaaggggaaaaagaaagggggaagaagagagaagaggaaagagagaaatgtaaacatgaaagaaggtagaaggaacagagattaggagaagttagaaaaaaaaaacttaaaactctttggcctcctttcctgcttattcactaacccctcaatttagagtgaaagttgtaacaagagcagtttaatatgctgtatatcagggtgagcagtttttttctgtaaggggtcaaatggtcaatattttaggctttgtgggccatatggtttctgtatcaactactcaactatgtcactgtggcttaaaagcagccatgggtaatatgwtatcagatgggtgtggctgttttccaataaactttttaaaaaaaatttttaacagcaaaaacaggttgcgtaggctgtagtttgctgacccctggcccaatgtatattgttgctaaatgttcagtgtagactacaatgtagggattaaattagagaaaatcaaatgccttcgtcaagacctattcatgatgaaatcgcacaccaaactaggaatgcaaggggccttccttaacctgataaatagtattatagttagcgaaaaatgacagcaaacataaatagtaaaggtgaaaattttagaatatgtcttttaaagagagtaagacaggaacgttgctatttctttttccatttatcatgatattgttagtcctgggtaatacratagggcaagaaagagaaatgtttataaggaagaagaaagaagaaagtaaatttgttcatactcagagtatatcattatttaaaagaaaattcaagataattcataaattttcaaggccgttagatataaaatcaatatgcaaattaatattcttttaataataaaagctaacatttgcatttaattactatgtgccaggcactaggcatgtgttaacttatttatctctcaccagcagtaactttattaggtagcactattattcccatttgaaatttgagaaaactgaggcacagcgagataaagagcttgcccacagtgacatttgctagtaagtaactctgtcttctgtaccagaactagctcattaaaaatgtaacagaaaaaatgattttcttttttttttattttttattttttttgagacagagtctcgctctgttgcccaggctggagtgcagtggtgcgacctcggctcactgcaagctccgcctcccgggttcacgccattctcctgcctcagccttctgagtagctgggactacaggcgcccaccaccacgcctggctaatttttttrtatttttagtagagacggggtttcaccgtgttagccaggatggtctcgatctcctgacctcatgatcmgcccacctgaaaaaatgcttttcataacatcaactaaaactatatgttacttaggaaaaaatagaaaatataaacgttattgagagaaaagtctgaaatgattagagagataatactatgcttatttagatatgtgggatgtttcygtattgaaaagctgtctagtcacaatcaattaaaacattttgtgaaattccaattaaatatcaactggttgtggtgtgtatgtgtgagagatttgacagattctataattcatatggaaatataaaattgaaagagtagccagacaattgtgaaacccaagcaaacaggcaaaaaacaaagacttgcctatatattgatttgtaaaaaagcttcagtacatgacatggggctttggagttagcacagggatagacaaatagagagaacagaagaggtagcttgagaagttatgcacgtgtgggatctgggtatatggtggaggtgggattgccaattagtgaagaaagaatggaatctatttttttgttgtggttgatgaaaatataattaagtctctacaccatttaaaaaaataaattgaagatggattagagaccaaatgcaaaaaaaggagactttatgactgtatgtagaatacagttacaggatagataggtagatatagatacaaaaggatatttttatgatatcaggtaaggaaaaaataacggattagactgcctggagttaggcatctcttgaatgactgaagaccgaaaacaaaggtaaagctagaccacatcctggtggaagatattgggatatatgatagatcaaagactcctacaaattactgaaaaaaaaaaaactccagataatgaaatagaaaacaggggcaaagaatatgaatatgccacactatttatacattatttaataaaacagaaaataaaattcttccctgacagtatgttcaaagttgataagtgcaatggaacaaattaatccacagtgatagactttgaagtcatgcatttgagttgataaaagatttcaggaaataaaaacctaaaataatactctataatatttataggcacatataaatatggtaaaatatgaaaatgtcactgaatatgaaccacattcatgacatagtggctgtttctgaggagaaacagagagggaaatgggatttgggagtataaattcatttgcaacttttttaaaataaaaaaatctgaagcaaatatgacaaaatgtcatttttaaattttgggtggtggatatgtaggttttgctatattttcctttgtactttttttgtgtactaaagaaaaagattgaagaaaataatacacttaaagcacttagcatgttgttgcctgacccactggaagtggtcagtgtatgttagccgttgctgctataattgctgttatgtcccatttaattacctccctgcaaaatcaytatattgccctcagcctgcctgacaccatccctggctggacagtccctctaaattagctctgctttcctgcttgacatggagggatttgaagtttcaagccaaactttggtacttaaattccttggtgattgattttttttttagctaaacggtagttcaaaagagtacctactgagaaacattgtatgcataatttaggtagattgctagtaacagatttattttaattaattttaatatctaaattgtgccagaacttttaaatagactcaatttcatgtcccatgtggaaaagtagatgcatctttctaatcttggttactctagggcaaggtgtgttagccacccagattgatcttccttgtctgtaggcaggtggagtagggagagtgggctgtccacctgatggtggggaacaggaaatctccagcccttgagcttggttctgcttcagagagagggtgtgtgtctgtgcccatgatttctgaagagagttaattattctgggaacagtagcttcctctcagataccctcctgtgcagctgctgttggcagtatctggtgagctctgagcttcccctccacaggtgcccccacttcatcagagagccagctcagtgctgctgggggaaccccttcctctgttcacctctcccttctgagcaagggattaagcaagacttgagaaaattaggtcctaagaagaggttttaaaaatatgtaacttgtgtgaaaagggtaaaacaaatcaagtttgtctttggtattctccagctccccctttaggactcctgtccccctaatctctagaaacctcttggtcattgttctttcagaagtccattgccttaccatgcccttggctacccagcatctcctgcaggtgactccagagccacctatccgcaaagggttttttattttttattttattttttttattatactttaagttttagggtacatgtgcacaacgtgcaggtttgttacatatgtatacatgtgccatgttggtgtgctgcacccattaactcatcatttaacattaggtatatctcctaatgctatccctccccgctccccacaccctacaacaggccccgtgtgtgatgttccccttcctgaatccatgtgttctcattgttcagttcccacctatgagtgagaacatgtggtgtttggttttttgttcttgtgatagtttgctgagaatgatggtttccagcttcatccatgtccctacaaaggacatgaactcatccttttttatggctgcatagtattccatagtgtatatgtgccacattttcttaatccagtctatcattgttggacatttggctaggttccaagtctttgctattgtgaatagtgccacaataaacatacatgtgcatgtgtctttagagcagcatgatttataatcctttgggtatatacccagtaatgggattgctgggttaaatggtatttctagttctagatccctgaggaatcaccacactgacttccacaatggttgaactagtttacagtcccaccaacagtgtaaaagtgttcctatttctccacatcctctccagcacctgttgtttcctgactttttaatgatcgccattccaactggtgtgagatggtatctcattgtggttttgatttgcatttatctgatggccagtgatgattgagccttttttcatgtgtcttttggctacataaatgtcttcttttgagaagtgtctgttcatatccttcacccattttttgatggggttgtttgtttttttcttgtaaatttgtttgagttctttgtagattctggatattagccctttgtcagatgagtagattgcaaaaagtttctcccattctgtaggttgcctgttcactctgatggtggtttcttttgctgtgcagaagygctttagtttaattagatctcatttgtcaattttggcttttgttgccattgcttttggtgttttagacatgaagtccttgcccatgcctatgtcctgaatggaattgcctaggttttcttctagggtttttatggttttaggtgtaacatttaagtcttttatccatcttgaattaatttttgtataaggtgtaaggaagggatccagtttcagctttctacatatggctagccagttttcccagcaccatttgttaaatagggaattgtttccccatttcttgtttttgtcaggtttgtcaatctgcaaagggttttatctttaaaattctttttccgtttcttcctaaaaccttatcaccgattgcacctccccacttcatcttaatcaaaaccatgacccctctgtgccttggcacctgccatttctttgctcttctgtctagatatataacccatttcctttctctctggtgctctacttggcccagttcaaatgccaacctgttgcaatcctgtwacttaccctgcagacaggtattttcccctgtctctgctctggaggccctttgaactctaaagtattcccctggcagactgaaaatggaatctttgaggctgaggctctcaaagttaaaacagaaccaggtggtcctagctgggggaaggaatggtaattgtgttctcagaaagatgtaaaagtatcacaggacctctctttctacaatcaagctaaaccagttcctattgttagtgccaagatgaacggaggcccaatcccccctcctctcaccagaaagaaacatcagccaagactcctggttttgggtttggaaaccaaacagagctcaatcagagctcaaccaatcagagctccctcgactcgactggatgaaacagggctcagctgtatcaaccaagcagggctaagctgtattgatcaatcaaaactcagctgtgccagccaaccagmactaagctagtttccatcgttcatttgcataaaccaacctgactggaaacctgggtaggaggttttgctataaaacagaacactctcattgttctccggaacatagcttcattttacacagcaggctgtgtctctctgatttccaaactgttcactggaataaagtctgtttcctccatattcctgtagagaacttttgttcatagaacataatctctgtcagcatatctcatacattgtactataattgcctgttggtacatttgtcttcctcttaaatggtagagaatacattttgttaatttgtgtttccccaaatagcatagcgtctgatcattggctctaaatgaatgaattaattaatgagtgaatggaaacttctattttataagtacaaggaagacactgataaattttgagttgaggtgatgatgatttgtgggagcccatatgtcatatatttcagccttccctgcctaaacgttaccctgcaccggcattgtaaaggaagtaaaatggaacacctcagcctcctctctcctacagatgcaaacctgccctgaaacctgctgatcccagtccactgtctatgccccattttgttcccctgcttttgggactggcccttgattcagagaacttaagaagagcctcactgcaactttatgctctgggtaatttaccccctccttgcctgaccacagacatgctaattactatcatttaaaggaactactttcatttattattaatcactataaaactctaattcaatgcgtttgccattatttatttctcaaacatgaattgaacacctgctatcaaccactatgctacatattggagatgyaaggattggamttacatgtcagattagttatatctttttgctttaaatccagcacatttttctattcatgtactgtttgtttttcccattctcttcctcatgtagcatattagacagctcgtagctttaagaaagaggcattttgattccccatccaaaggaaagaaggtaggcttgaaaggtgagaagcagaatgagtttgtgtggtaacttgggaccaaactcccaacaccaggtttgatcttcccattccggggttagtaaactgggccttgctttggacaagcctcagtggggccatcactgtccttatttacattattaatttgggtagccagtctcttttttttttttcacaaggaatacagaagtaacttgcwggacagttatcttttatgtagctataattcttcagtcagtggggtttggctacactggttttactcttgtagagcatgaaatatttgtccttgagagaaaatgagatgattctgtagtttcacatcggtaacygaataggaaacgtggttcattcagtggaaatttggatgggcatttgtggcatctgagtgtaaagtccttgctgggcactgtccacagtgatggaggtcttccagtgtggtggccatgagaatgtgcctctcaggtattggaatgtaataaactgacaaacccaacagctctgctctgaaacccatcaccaatgctgcccgtgaactgttcttggttgctgactcagcatggcagggagactaaagcagcccattcctggagatacaggactcctctatagtcttgcaaaacttgccttagacctggactatagtatccctcctcccccacccatctccccttcttccctcctccccwccctcctcmcccacccatctccccttcttccctcctccccaccctcctcaccctcccctccctcctcaccctcccctccctcctcaccctcccctcccttccccttcccctttcccctccataccccttccccatcccctcccctcccttccccttccccctcccttccccttcaccttccccctcaccttccccctcgccttccccctcccttccccctcgccttccccctcccttccccgtccccttcctctcccttccccttcttctcccttccacttccccttcccactcccatctcttgcccttccccttcccctctcttacccttctccttcccctstcttgtccttccccttcccctctcttgctcttccccttcccctctcttgcccttccccttcccctctcttgcccttccccttcccctctcttgcccttccccttccccttctccttccccttccccttctcactcaagagcagaccagaccagcattgtggactcacagttttcccaccctccacaggctccctcctcatttcctccccaaggagtttcccccaaataaattagtctgctgggactaccacaacaaataccacagactcagtggcttaaggaacagaaattcgttttcccaaaattctggatgttaaaagcctgagatcaaggcgttggcagggttgcttttttctgaggcctccctctctggcttttagatggttcttttctccctgtgtcttcggttggtcttctctctgtgtctgtgtcccaatttcctgttcttataagaacaccagtcctattggactgggcccgtcataatgactgcattttaacttattagtcctttaacctttctaaagaccttgtcactaaatacagccacattctgagctactggaggttggaacttcaacatatgaatgtttagtgcatcccataacacctactaaactactttcatgtttaatcctgtattaacctttactttttagaggaagtgggccaatatacccagcctccataatgggtccctctgatttcagattgcagtgcactaagtttgctaagcctcagagacaactgtggggtgagggctctctttgacctcctacctattttggaggtttcccaaagtctttagctttaactttgtctttcargcatttcactttatatgttataataagtttggctatggttaccatgattaaatgaattcactatccactgtcattatttctagttgttagttggtcaaatacagccattgttctattaggttcaaaccaagaagataaagaaatacctaccastccattttagcagataatataaagttttgtatgtcattcactggtggagattttatttttccatttttacaatggattatttttattaaagttttataggtagctttctgtcttctgaattttttattttctctttcttttaactgacaagaatatacttgtaggtaaataaatttaaaaaataatctttttaagttctttatgtgagttcactcgaagcttattataatgtaatgagcacactaatatgaaataaacagttcttttagatcttaaatatcttgtgtgtcagagaaaacaatttttctgcctggactggaatgtcctttcaccaaatttatatgctatattttctttaagggtaagttcaaagctcattttcttcatgttgttttcttactttggcccatcctctcctctcgtatttttctataaatcatgtgtactgtaactttcttacgtattgtcttatatttttcttcagtggcttcaggtatgtgtacaaactctggtctccacagctagattatcaatttccaggcatatcttgctatgttatttagatgctaagggaaaaacaaaaggagtataagctatgattcctgtcaacgtctcctttaatgttggaaattgtgagcagcaaattttgaggctcaactgacagaaaacaacattcagtatgcaaatcaagtgcaatttataataaaaattagtggtagatatgtatactgccatacgaattaatagtcaaaaatgatacatgtatttcatatgtaactgtaattggcatttyttttacatagtcaaaccatgttttcactttttcttcattaattctgaggtacatattaaaagcatccaagttggcagttttttcctgacactatatatagtgtaactaaacacacacacacacacacacacacacacacggatgcgcatgcacgtgcatgcacatgtctggaattcagcatctgactagctatgactccttgtgatcctgtgttctgcagggctgagatatctccgctattgtttgtggttctgcaggcttctcctttaacctctttgtcctctaatttaaaaggtcctagtagcccccactccttgctccctctatcctcctttgaaattgtgagacagcaaaactttggggtttgcagcctgggctgatggatgcagcaggatggtaatactttgagagaaaggaagcagatgagtgtccagaatgccaggtaagttgtggcataaagtgggggcaagaacagagcaagagggaccagcatgtcacagtctttggtcagggaggaaagaagtgaggttgggggagggagaggytcagacaggtgagagacctgggctcttccttggtgacagtagcttggaaaattcccccaagtcttctgggcttggagcaagtmctgggaggcaaattggggataccagaagccttgtgtatgcacccaagcaagggtttgttctctggaatccatagacatggcttcagcctcagagatccatgagttcctgaaatatttttgatagggttgtatatttttttcctagtgagaagatctatacccttagcaaagggatctatgattcaaacattggttaaaaaccatttcaccatcatgtaaaatgattttcttaaatcagttttttgagctgattatgtgggaggaagtgtggggttgagcaaaggcactgagagaagctgaggggtaagcaatattctgtctctctggctcttatccttctgtttgtctattttaaattaaaagcaggagaaaattaaaaggaaaggtaaatgtgggtcattaaatagaaccaggagcaagattaagatgactataaaacctgtttacttgcttaggayaggtcataaatttagctctaaccaaaaagaaaaacctggttagttgaaaatgccgtaggatccagaagaaaagacagaacaattgctctgggaaaagtctgtccttagtactaaaaccagacagggctctctccccagaatcataatgaagggcactctgtgcggcgtaacaagcagtgtccttacaatctcctagccatggacccatggtcaaaccccacatttggctctatgattgaccaaaccaaatggcaactttcaaagtagcaactcaatacaagcaatcctattagggccaatactatggggatcccagggtggggatctgctgctcttccttgcaaaatgggcattaaagttttgagtatttgggcaatatataggtgctccaggcaggccatcaaatacaaaggattccttccacctagttgaggatacagattgggtagccatgagtttgcattaaaattgtggattctgtgttaacagtcatcttccttaacaataatgctggagaaagggttgcagttttcttgcaggaaaactgaagagtttttgttaggatatgcgactraacagaaagataccccacttccattaagaagggtacaagggagatttactagttgtatcataagcagattccttagctcctctatacctcagtttttttttaatatggtgtaggtataagaattagaactgcacttataccaattgagtgaaataaagtgtagaacactggacaactgatagttatgacttgttaattattcacaagaaagccaactggaattagcttaacaaatatactggtccaaatctcaaagggcttcataatctttgaggcgagtgaaacgcaataatactgataaatatagagcaagccagtagttggtaattaaaagcccaaatgttgggggcaagtaacagcggaagtcagaagagagaaatacctgtcatattgtcagggaatgcttggtggaagtcgtgacatgtggaattagaagagggagaggctcaagaggagaacagagtgaaaaaagccatctgagagggaagcagtatggggatgggagcctgtgtggctcctctacgggaagaattaactaacattttttaataggtccctctaggcatgatgaaatctgtggggattaagaaacatcacagattccaattatgtcaaagggcagcttgtaagttgccacaccattgactgatttctcacactatgtggagtctgatgctcatcactgtgctgaaggtggaagatagagaggaagctgcccctgccttttgaggagctcagtatttagttagagagataagctgagaaacaagtaatagccttgtggagagtggaattgggaagagactactgtggctgggcgctccaagtggctgaagcggatgtgggagagcagtcagttgaagtccagccaagtatccaaccaatccaaccagccagtcaatcaatcacttggttaatttatgcaaactacacaggcctgagtaaatgtttcacgaaatcgactggttgcttgagtgaakcaacctaatcaagggtttgctggcaccgtatagacacagccttaacaaggcaaatatcattgtaatctcttgcctttgaaatgattctatggtgttttccaggggatctgggctagtgatcttgtcatgttttgacattctgccccacagtgggaaaagaattgttttttatggagtatcattcgttgtctaaaatacagctctgcaaatattttcaaatatttccaacattggcattatttcagtgatacaaagatgtatttgaaatctctttttgaaggctgaagttctttttctggctatttactggcaaccaatctaaactgagctgctttygtttatgaccatgctcactttcctagcttttaaaaatatttgcttttaaagctctgcagatattttttttcatgcccaccccaaccaatcacttttgaaatggcttgagtgaaagttcagagttttatgagatttcctacagtagtgctatttttagggaggaaagaatgatatttagttcttttcttttccaaaaaaccaattttgtctccatgatctactctacagcaatgttcagagttatttgagggataaagtgagtacaattttgcttttatcccctggagcttstactagtgaaaacactgaatttgtgtaaggtcagggatgtacctctgtgacatagattgtataaccaattttgtaatctgactctgcagcctcctagtctgaacttgagtcaacaacaagcacaaagataaactttgccatttaggtctggatatgaagagggaaaagggaaggaacagggggaataaggttagtatagcagagcaactgttggttttttgtgcagtggattagctgctttacctcttaagtttattttggggcagtgtacctgtagtacagataatgaggtctgtaatatgggcttttatcttactgtctgtagtcatttgatctgctcaagggtcataaactcaaatgcctatagtggttgttacaagctatataaacatatcataacaggccagctgtgacacaatagggaatagtattgccaatggcaaactggagactgtccatgcatttgtgtaagacaattaaggcttttctgcaggctgaatttggctgcttagcatggttggtttgcaactcctaaattaaagtacatgaaaagaaaatgtatttatrtgtaactggtagagatgtaccaattaattatgcagtgatatcactgtgtagtttgtcttgcatttccttccccaatttgataaacaggataaagaaacagtggatggaggcattccatcttagagattcagaattttcattctttcagaaaactattccattagagaatgacaatgaatcttcccagctttaactcttgtggtatgtcttttagacascataatttgtgatgcacagttagtgcttatggggaaataattgaatagattaaaagcaatgtgtttacacatgtgattttagctttcattattaatggagtctattctttttatgtgtccagaatttatatgaggktgattgttctctatatctcttaaaacataggagttgtggtttaatacttaggaaagtcccttctatctaaaggtttgtgggagaagtgtatatagtgttctgcataatcaatagaaagccatgatgaggtacatgagatttggagaaagaacccagctttccaggtttgaattctggttctaacatacatgatttctataactttgagcaaactacttaaccttttaaatcttcagttttctcatctgtaaaataaaatttttgtaaggtttaaatgaagtggtacaggtaaaatgagctgatcagttcatggtacataggtgctcaataaatgtttagatatttctactacttacaattataattaatattattactagagatataggtgtcctaatctgacataggggccatagagattatttggagtaagtctcaagaataatgtaaggcttgtaatatggaacattgggaaaaacttaaaaaaaaattaaaagctgaagatttttaggctggagaaatgaagccaaagaaagagaatattgctattcaatctgattaaagcatatgttacgtaggtctatagatcaaaagaattagaagttaacacagaagaagatttttataatttttaagtggaggaaacattgtaaattgagttaaaaaaataaagcaacagaccaggagacaaaaataacatctgaaaaaattcttgtcactatgctcaagaaaatattattaaaacaagataccatgttagaaaaaaaaaaaaaaaggaaacgaaaggcctcagggtagtttctggagatccactgattaaggatatctagaatggcctttgggagaagttttagatagaagcctttctctctagattgtacagcaaaagatgcttttcaattcagcatttagtagaaataacaacaacaaaaaagcaaaaataaaatttaaaaatagaaaacttttatccttcttatcttatagaaaaaaaccacaagctgttagtcatcccctcttgtacccaaatctggaagagatccatactggggagagttggagttctgcaaagggaatggatgatttgagggctatgtggtctttttatattttcttaaatttcccctgttcatgcatagttaaagatttgggctatttatctctggtgggaattaagattgctattgattttttaagtaccccaaattgagacagtaaatgaacctttacaaagtacagggcttcaattttctataaggagcagagcattgctagaaagatggttggaatagtcttctttggtggtagactgcacaatttgagtgtcccaggagtgtgacctgatgggggtgtggacggatgggcaaaaagagctcactcctctgaaatgctgctagaggccagtcacccaaccagtgaaagtgagttgaatgtgacagtgtcctggagcaggagtcctgagggaaatagcaatgcacagttacaggaaacgctaaagtagaaagtgtgagagctgttggagcatgtctgtgaggattaagttcctgggatgagcacagtggtgtcactgggcctcacaaagagaacaaactgtagctttgaaaagtgctgaaccatgaaatatattttagatttaaatttggaataacaggaatagtaaaagaataggttcaccacttggacatgatggtgtgataggatagatatggagaaaagaaagaccaattcacatcttcatttacttctatttttttctttctagaagagctaataatcttcaaattgggacagggaggacaagacatatgaatatgaacaactaattaattcctaaggtagatgaggagaaaatagaaggtctaggcactgtcactgccccagacacagatgtagaacttcttaggtattaaagaatgtgaagatttggccctggaaatggtggagttctgcaggcacttatggagcttaagaagaatctgaagatggagaggtattgagattttcaacaaaggtacaaagatttttggaagttcagaacaacagtattgatgttaggatagtttttagtgctttagcagataactcgatgatttttttatgaagaaaataagtgaactctatacatatattgcactaacataaacatacctttgagaataaggtgatcttattaatttgttgatgtactgtatttttatttcaacagagtatttcttaaaagctttagagtttgtaacagagagatacaataaaaatgtgaactgcatgagggcaccattagatggatttaggtggatttkcagtgggaggagcagccatgttcaaaaagggccaatccagatggaggtctctagaacatttcagggctcttggttggctccattctcttcaggtaattgaaaataaataatttaaaaaaatagtataaatagggacatagagaaatatgtttgtcaaatttgcagataatgacaaataatatgataccaacatttttaaagcctctagatactgaaacaaggggaaaaaaacaaaaggaagaaatgtagtggagctaaatttaagattcagcatttatatttcaggaagtgacttgaaccaatacaggatgtggaggtctgatttgacagtaatctacataaagaaaacctggggtttgtgttgaccacacagttggcttgatgtgaaccaactgtgtggttcctctgctgaagaaattaatcctatataacaaatgccccaaacctaatgcaagtgcaacctgcattaacagaagaggattgtccagctcttaggaagttatagtccagctgctcttcactggtagaccacatcttaaaagtaatattaattcttcagagagggtcagccaagatggtcagtgggtctggaaaccatgtaacattagaagcctggtgaaaaagaggagtcggggacatcctttctatccaagaacatttaaaagggatgtcatgtaggaaaaaaagtagttttcctgttgttaagttggccgaaataggttaaatagatgcacattttagctaaatggacacgagattctttttattttgaactaccagtactattcagcatgttatgggtttcattaggatgtagttaattccctggtttagaagtgttccaaatagaattcatttaacagatmtttaatgagtactattatgtgtcagacactgttctaggtgctgaggatagactgagatggtgaagattaataaaagaatgagttgagataaacagagagtaaactgatacatatcaacggtattcccccgttagtcctagaattggggctttggctcaaagttgaggaccagaaaattaagtgcccctttttctaagttgaaggtgctactggcccctggaatagctctcttgaagtatttattgagaggcactgggtaagaaccaaccttaccactaagcccacctgcaccagtcagtataagaagactgggaggggtgaaccttctggggagtgctttttcagagctgagctatcccctttcctcccatgagggagaagacctcaggtgttagagcagctccacttgtaggcatctggggagtggccaaggtgcaggagctggaccaatgtgtaggagtaggagtttgaagcacwcaacttgaggaaaggcaaaagaatcatcgccaccccctggaagggtagcagagagggtgctgccttcagaaaaccccactcctcacctgggcagatttcttggtcaagactatactgactcagcataaaaccttgaacaccttttattcgccaggcacataaaaagaatcttttgagtgttgataatggggtaggttgtgtgtttgttgtatggtgaggttgggggacagaggacatataagaactctgtactttttgatcaattgtgctgtaaaactaaaactctaaaaaataaagtctattaaaaatggaactttatctaacaaggaggctccccatctctcagcctggcaaattgggtaaagagtcaagacccactggtgtgctgtattcaggagacccatctcaaatgcaaagacaaacataggctcaaaataaagggatggaggaagatctaccaagcaaatggaaagaaaaaaaaaaagcagaggttgcaatcctggtctctgataaaacagactttaaaccaacaaagatcaaaagaggcaaagaagggcattaaataatggtaaagggatccattcaacaagaagagctaactatcctaaatatatatgcacccaatacaggagcacccagattcataaagcaagttcttagagacctacaaagagacttagactcccacacaataataatgggagactttaacacaccactgtcaatattagacagatcaatgagacagaaaattaacaaggatatccaggacttgaactcagctctgcgccaagcagacctaatagacatctacagatctctccacctcaaatcaacagaatatacattctcagcaccacattgcacttattctaaaattgaccacataattggaagtaaaacactcctcagcaaatgcaaaagaagagaaatcataacaaactgtctgtccgaccgcagttcaatcaaattagaactcaggattaagaaactcactcaaaaccacacagatacatggaaactgaacartctgctcctgaataactactgggtaaataatgaaatgaagacagaaataaagatgttctttgaaaccaatgagaacaaagacacaacgtaccagaatctctgggacacatttaaagcagtgtgtagagggaaatttatagcactaaatgcccacaaaagaaagcaggaaagatctaaaattgacaccctaacatcacaattaaaagaactagagaagcaagagcaaacaaattcaaaagctagcagaagacaagaaataactaagatcagagcagaactgaaaggagatagagacacacaaaaaaaacccttcaaaaaatcaatgaatccaggaggtgggtttttgaaaasatcaacaaaattgatagactgctagcaagactaataagaaaagaaagaaggatcaaatagatgcaataaaaaatgataaaaggggatatcaccaccaatcccacagaaatacaaactatcatcagagaatactataaacacctctatgcaaataaactagaaaatctagaagaaatcgataaattcctggacacatataccttcccaagactaaaccaggaagaagttggatctctgaatagaccaataacaggttctgaaattgaggcaatcattaatagcctaccaaccaaaaaaagtccaggaccagacagattcacagccaaattctaccacaggtacaaagaagagctggtaccactccttctgaaactattccaatcaatagaaaaagagggartcctccctaactcattttatgaggccagcatcatcctgacaacaaagcctggcagagacacaacaaaaaaagaggattttaggccaatatccctgatgaacatcaatgcgaaaatccttaataaaatactggcaaactgaatccagcagcacatcaaagagcttatctgccatgatcaagttggcttcatccctgggatgcaagcaaggctggttcaacattcaaaaatcaataaacataatctgtcacataaacagaaccaatgacaaaaaccacatgattatctcagtasatgcagaaaagtcctttgacaaaattcaacagcctttcatgctaaaaattctcaataaactaggtatggaggtaatgtatctcaaaataagagctatttatgacagacccacagccaatattgtagtgaatgggcaaaaactggagtcattccctttgaaaaccaacacaagacaaggaggacctctctcaccactcatattcaacataatattggaagttctggccagggcaatcaggcaagagaaagaaataaagactattcaattaggaaaagaggaagtcaatttgtctctgtttgcagatgacatgattgtatatttagaaaatcccatagtctcagcccaaaatctccttaagctgataagcaacttcagcaaagtctcagcatacaaaatcaatgtgcaaaaatcacaagcactcctataaaccaataacagacaaacagccaaatcgtgagtgaactcccattcacaattgcttcaaagagaataaaatacctaggaatcaaacttagaaggaatgtgaaggacttcttcaaggagaattacaaaccactgatcgatgaagtaaaagagaacacaaacaaatggaagaacattccatgctcatggataggaagaattaatattgtgaaaaaggccatactgcccaaggtgatttatagattcaatgctatccctgtcaagctaccactgactttcttcaaagaattggaaaaaactactttaaatttcatatggaaccaaaaaagagcctgcatagccaagacaatcctaagcaaaaagaacaaagctggaggcatcacgctacctgacttcaaactatactacaaggctgcggtaaccaaaacagcatggtactggtaccaaaacagatatatagaccaatgggacagaacaaagtcctcagaaataacaccacacatctacaaccatctgatctttgacaaacctgttgaaaacaagcaatggggaaaggattccctatttaataagtggtgctaggaaaactggctagccatatgtagaaagctgaaactggattccttccttataccttatayaaaaattaattcaagatggattaaagacttaaatgtaagacctaaaaccataaaaaccgtagaagaaaacctagacaataccattcaggacataggcatgggcaaagacttcatgactaaaacaccaaaagcaatgatgacaraagycaaaattgacaaatgggatctaattaaagagcttctgcacagcagaagcaactatcatcagagtgaacaggcaacctacagaatgggagaaaagttttgcaatccacccatctggcaaggcactaatatccagaatctacaaagaacttaaacaaatttacaagaaaaaacyatcaaaaagtgggcaaaggatatgaacagacacttctcaaaagaagacatttatgcagccaaaaaacacatgaaaaaatgctcatcatcactggtcatcagagaaaggcaaatcaaaaccacaatgagataccatctyatgccagttagaatggcaatcattaaaacgtcaggaaacaacagatgctggagagaatgtggagaaatgggaatgcttttacactgttggtgggagtgtaaattagttcaaccattgtggaagacagtgtggcgattcctcagggatctagaactagaaataccatttgacccagcaatctcattactgggtatatacccaaaggattataaatcattctactataaagacacatgcacacgtatgtttattgtggcactattcccaatagcaaagacttggaaccaacccaaatgtccaacaatgatagactggataaagaaaatgtggcacatatacaccatggaatactatgcagccatataaaaggatgagtttgtgtcctttgcacggacatggatgtagctggaaaccattctcagcaaaatatcacaaggacagaaaaccaagcaccacatgttctcactcataactgggagttgaacaatgagaacacaaggacacagggaggggaacatcacacatcagggcctgtcagggggcagggggctgggggagggataacattaggagaaatacctaatgtaaatgatgagttgatgggtgcagcaaaccaacatggtacatgtatacctatgtaacaaaccttcaccttgtgcccatgtaccctagaacttaaagtatatatatataaatcacctagaaatgatatgattctaattgttaaattaaagtagctctagttgcttctactgggagcaagcctagctcctctatttttcagaatgacaatgatacagctaatagagaaaatagagtctgcttttcgccagctcccttgtggactgtctctggacaggatattgacttccagtgagtggtacacaacttgaaaaaaaataaatgtaaatattgaagatacaggaaactccaagaaatgtttgttcctgcacctagcacagggcctggcacatacaaagcatccagtacatgtttgttcatgtgaataaatgaacaaatggactgtgggactaaaagagaggcagctcccagtctctaaactagcacatagcggagctaaaacactgcactttggcaaggaaaaggatgggggacaatattgttgtttcatagcagtcaagcaaaatagaaaataaagagtctcttccttcatgcagcttttctcctgggtatggtggctggtattgatggtccccaagggtctagtgtctgaggaaagaagagtaagaagtttaaggagattatgaaaagaagtgtgtawaaagaggggatttcactccactctctatcaaaagaccctgtagtctaccttgttctgggaacaggaagagcctagatttgaataaattttgagatggatattttaaaatgaatagggccaagtcttaaatgtcaaagtgggactgctcttaggctcaagtggctgagaagctataggatttggccaagtttctacaaaggagctgattcctctcaggaagggggagttgacatagcactgttagggraaatggccttatgtttatgtcctcrtaagcagagatttttccataaaattattacataaataaaaacaacaacaaaaacataggaggaagtgaaggaaataaaatggaattggtgagatcgtatgaagggcagggcagtggagtgggagggatgaggcttttctaggtagggtgtggtggggttgccctgaggaggtggccttttggagctgatgtctgcatgaaaagmaggacccagccatgtgaaaacatgagtgagctctgcaggcaaaggcaacagcaggtgctaaaaccaggaatataagtccagtgtgactcgaaggagggaagacctgatatgtgatgaggtcagggatcaatttctgggagaccttgtgggccacaggaaagtttggattttattttattctcagtgtgaagtctctggagggtttcagtcagcaaagagatgtcgtctcttgtgtgttagaaggatgcttttgagtgacatatgaagaatggagaggacaggacgagtgtggaaacagggagacccagttccacagtaactagctctattttctgactatcgtattaacatctcaattgttgttgtcattgttaatgatgaatacagaataggccccagaaaacagtggaaacccctgatggtgaatgctggacaaatctttctgtctcccttagcttcatagcaattgtgaaataattgctattaaaatattaacagctgtcatgtcctcagtgctcactaagtgccatgccctgggccaggcatattaattaatcttaccttatttaatccttataagaatatgcaccagcaatgctgtagaagaggtggcagctgttaatagccaaatacaagacttgacaagctatcaatttcgtcaagcaaatgagtagcagtgcagtgatgtaaaaccarttccatatttgactaaattccctcttttaaaaaagctactttattactttatttacaggcctagccttggagaaaagactttaatatcaaaaggaacacgtgaaatagtcctccctacatgcagagatattttgaagttacaggcagtgtcaggaatacatctyagaaaaattactgatcattttctaaaatgcccttcagatggtatggcttttaatatttagaaattttgtgttacatagtgggttccaatgtagtttttctatttatggagggcctcactttaatgagcaaacaagattccatggagctgtgcaaacactgaatgaaggatgactgtggatttgaaattggaaatttttgtcagccaaggagatttttggggggtttgtttccatgaattcagttttacagtttttagttgatgaaatgatcaaaaccttttggctctaagctaacatccctttgaaatgtaaaattaatagtttaaaacttaaaggagaaataatcatggttttaggttttagaatatgactagctgttgtgagtatttggagacaaattttctccttaaataccactgtccgggtttgaaaattaacctcttttatgtacagttggaaagtattttcagtgtctgtcccttttgcatactgtgtggttctatgaataacatgagggttgttggcactaattgataacaaagacttaaaaataggttttgccataataagaaactataaataatggatgaataaagaacattttataattgtttaaattttgttctgagggttgttggcactaattcataacaaagccttaaaaatagatttgccataataataaactataaataatggatgaataaacaacgttttataattgtttaaattttcttctaaataaagaaaaaacacctgtgataaaagccgagaaaacccgttatgaagaaaacagttgggaaaaccaaagtactaccgaaaacataaaagtatcctttcagggtattagaaaaatcaccctgtaagtggaagtgtgcagttacttcacaccaatgctagaccacacaagactaaggcgagggggcatagctgggtttctagaaagtcacctactctaatttattatgttactaccgtcaattgagcatcttgctaggtatttaaaaacatgttctcataatatagatcttgctctcattttatagatggggaaactgaagcttagagaaattaagtgggagaactgggttttggactgaagtcactatgctacactgccttctagttattgtaaaaagctgtaaaatttaggtgattggtgaaacaaaatgtacagaaaagtataatactcttgcattacaagtataatactcttgcattacaattaatgagatttttttgattagtaaaaagtattctctttctgtctctgatgtctttctttcctgattcatatgcttcttcctagaagtcatgatcttggaaactgtggacccaacctattcttacataccttttggcctgaarcgaaatcccttattctcccttcattccccaccccattcctccctccacccccatgcctctccatctctcttcccctgtcagggttgggtgcatgagtggtctgtggtgctttgggtagggtaaagaattattatagtcattaaatttaaaaaaataatattttgtcttttataagttgacatttgcaatggaaactgatttatatatttaaatacatctccatttttaaatgaattaaattttggacaaatccttcaaacatctagaagatccttacagaccacattggaactatacttaagaaccactgcttccaagattgcttagagttcagacagttaccacacagtgayctgtgctgccataataaaatttgtattggaaaaaaaaaaaaagaaacattatcagttcaaaggaagaaaataagtggtgttattctaataagatccaaaggcagttttaactatggcttactatgatgtttgggctgtgagccagctasttcctagccagaaaagttagaactgataagagcagttttaatattgtcatcaattattaatcacctacaacataggacttaggtttggatgacatattgtttcatcggcattcaactcaattatgaaactgaaatggaaggacacaaaattgttaaaaaatcctctaaagtcagagacataaaaattgcacatatcttttcattgtattttctagtatcctttctaatctgaatctaatcttgtatttaccaccttaaaaatggttggattcagtctaacaaacttaataactattactagttrtgtggctaaatcttttttctaaaaatgtttttatgtcaatagctgaggtccctgttttaagagcatggcaagtagatttttctagtgacatcacagatgtgtattgtctttttctgaataaagtctactagggatatttaatttaggtgtaattaaacagagttacaagatctaccactttgagtcattgattgaactgtccaaacaactggattgactcacctttttataccacctacagtgacatagctgtaatgagtacattgagaagtaacatatagttaaattgctggaaattagtatcatcacttagtagccacttttatcattagaaaaataaaaattaccaaggagagaaaacaacagtttaggcttgggcttattatatttctgagaagttgatttctttaaaaaaaatttccctctgcagtacctttctggcttcagttccttaaaggaagcagctggggaggtgtaggatagtagtgagggcagggtttcagtggaaaacattcctggccaaagtcctatacagtgtggaagccaagacttcagagtctttctgtttcttttggtctctgtgtctcttcctctttcttctttaagtaataatttgctgtatttgcaatacttgtgaatataagtgagcataagtggctttctcctgtagcagccttttgaaaaatgtgaagatgttattccttgtaagcatttaaaactaaagttgaaagaatagaaagtgttggcaattgcacatcacacaatcgcttatctcttcttcaataatgtactattcagcacagtatccattcccttagctaagggaagctctgtggaattgccctttctcccacttaaaaggagctttaatttcctatctctatctattctgaatggtaattggacattgagattcttgtttcctgatttatgatgataattagggcaacagaagaataatacaaatttgaccactgtcacataaaacgaaatgtaatctgaataattacaaggctaggtgatgakggttcttcccctcaccttcttaggagggaaccagtgaggtaacacatttgtattaaatgaatgggcatttttgagcttggccaagatgatgataccattcacacctagttcctgcaggaaaatatgaattctaagtatccatgattgtggctactgttttatcactagagttataaacattttgttcttactgtcccttgcctgccagactgccctaaaagaagtgaaatagtcagaaagacaactcatcagggaggtgatgcttggtaaggggcttctggctgctctcctaggggagatgtttgttttctttatttctgtgctggttcaaggtgagggagatggacagctgtgaatgtgagagatcacagaaagatgagagcagggtgaattcatcagggagcactacccccaagtgcaacctctctctgctcagggctgtgcccaggcatatgacccacactgtatttttgggaaaatgagagtgactgctgaaagttcttttctagcatagctttgtgattacataatactaacttactagccttttgaaaatggaaacagtccttaaaatattctttttatggtctgcatgctattctgataataggcacaattgccacatttgggcttctgtgtatttataatctttgcctcagaatttaagtagaaactcacttttygtgttacacttaattaggttgggatctgttctgtaggaatgaattttactagcttttacttctgtttcttttaatgaaaattcctcaaatgtagttcagtgtagagaaagggcaaaagagaaaggagataatgtttgcagagagcttgcagtggtgtagataggcctttgtgctcattgtgtttgtttataaaggatctcatttaatactcacaaaatataggtattcaggaaaccaaagctcagacagattgggtgacttgctttgggtaacataattagcattcaatagagataagattcaaatcttaaggtttttgacttcaaagctgtatcagattggacacaccttacagtgaaatttgtgcggcaatggacaatgttatagagtgtgcccgtgtaatgattcttggtgtttgtaatacttgttcaagctggccagagctgatttttacatatcctgcaaaatggcagtgtcatgacaaatcagtgtgtataattaggaaaagaaaaatgttagaaatctatttatgctttataattaaaaaggcactggtttactgccaaattgacatacattttggaatcagactgtaagataattctttcatgttacttatgataaataatgctatttaaatgtctaaccatttgctatagcacctggctgagctctcagaacaacactcccattaccttctcagatggtcttgagtcatatacagcaatggagaaagtttgtttttaaggacaatgttatgatgtgacaactgtgtctttaaatataccagttttcaatagtttaaagctacaaagcttccaagagataacgtttataattctaaagccttatcctaaataaggtaacacattcattgtatagtttgattatcccatgtgtttgtgtagtaactgtgtctatattgtaaaaagggacttgaaatggtttctatttttgtttctgtatatgtcatccctactttgatcacttccttaacaataataactcctcctcccatcccactacaaccctgtatcagctagggattgtatttgatttcaagtaaaagaaactggtctacactgacttaaccatataggagtctgcttttctcacgtaacaaagtgtacagctagacagtctggaactgatgcagtggctccaggatgccctcaaagctctagtgtcgtctgtttttcccttttgtcttccttagtacgtggctttcattcttatggttgcctcatgttacaagatgactgatccacttccaacctgttgttcaaggtaagaaaaagaaaatcaggtgtcaagcagaaaggggctgtgttaccattgggaaagcaaaacttcctggtaatccttagcagcctcctgcatatgactttttggtctgagttgtcatagtcacccctagctacaaggcaggccggcaaaattagtaatttgtctaggctcattgctaccttaaaaaatgtggggttctgttagtaggtagaactggtgaatgtgtattgggtaacaagttagcagtgtccaccctgacccaaaccctagccctgaactgcctgcttacacttggcttttggactaggatggtaaatggaggaggaaatggtaaaaaaaaaaaaaaaaagccactttaagattttcagggggctctttattgctctccattgtgtgttttcctcttctcttccttggtgttttgctgactctgctccctctgactttggtgatcacttttccttattattattttttattactcatttgccaggtatgtcattttcttagtgtaactttctctaacactccaggcaaagtgaggcagctgccmtttatatatgcccagcacctggaccttgtttttgtttttgatttttttcttttttgcgtatttattacaattactcttattggtctgtatgtgtgtatgtgtgtgttatttgtccagtgcyttgctctgttcttcactaggctataaattccttgaggccagcggccatatttactttgaatctgtatattcctccttgccccagtgtctaacacggtgcctaggataaagtggattctcaataaatatttgaataaattaataatgaatatattttgttggattttctttcctgttttttcttttttaaaaaaatgcatttcttttcatcctcttactctgttctcactttaagcattatttaagtattttcgttaatattcatccattcatttatatttctatttttctgtccctgcttctctctctctggattaatcttcccctctctcagatgagtattatctttacatttccatcccagttttcttactcaggtttcagttatcacacatctgactgcctactgctttttaactggaatgcctctccatcaccccacactcaasaagttccaaatgacatgcatcagctccccatctcaattttctagcctctgaaaaagatgacaccttcttctttgaaaatgatgacaccttcttctagctacttaagcttgaaaacttggtgtcatttgtgacatcatttatttatatcacyaagggctatttctgcagcttggcaaatagctctagctgttctgtattcttattgccatcacctaggagtacaaygtgtagggttgtgggtgctggtacatgtgggatggcaagatcaagggtgaacaggagtcagctgatcartgttctccatcmagcagtacactcatttatataccatgttttggtgctcatgactcatggaataatcaatttagataatttgggattactttgtagtaaaatttaagagaacttagctacttaaaataggtcgtgaattttgtgatagatatggacaacttctgcagtattgatgaaaatatcagaaaacagtattaaaatctacagattatagttgcagtaataaagggttttgtaaagacagattaratgttcccattcaatcgatcttataatgcagaaattagtggaaattttttgaaattaataggtatgaaacttaggaaagttagcacaattgcttcatagatgatctcattaatcaagatgggcatttttcttttatagaaaatagtgaattatctgaatatattgaatgaataaatgaataaggcagtgtctctatactaagatgattgtttgaaaagtgaaaaaattttaataaactttattttagtatttgtagtcaaaactaccagttttaaaaaactatgagcaaagccacatttaacatgaatcttctacaagcatattgtgaatgtataacttttgcatggctttagattcgtgacttacatagtatttcagaaattgagagaacacatcatacattaccctagttattataaagaatgcaggtttctttaggaatttttttctgtttggattgagaaagagcaatggtttatgatacatttcattttttgtttggtgcatttgtcaaactgaaatttatctctgtcaccatgttctgttggagaggttttttgatagatacatatttagatatatagggcacagaggcagtaacacgattatatcattcttaatttccccaattttatatcatttttcttgctttgtcattcaagcatcaatttgattatggggattacacacagagaaaagtgttgtttttggaatgcataaagactttgtttccttttaagtttacttcacctggttctgctccttttagtgtatctaggattggaatgtaggaattagggccatgcttagatttctgctacagtctaactcccgtgggaggaatagtgcctcaaaaaggagatcagagaccacgattctattcctctttattggtggatgtatttcatttattatttttagagatgcttctcccctggayattttcatgtgttttccaataggatagaataaatgttatttgggttttcatctatcataatagaaagctactgtcatgaagagaaactagaggcttgagaactagggcagtgttaagtcaaatatctaagcttgtttgtatggcaaaaacagtgaataagagatattcaaggaatttttaaaaatatgcccaatctttttctttggatctcattctctcaaatgtcttaaaccaagaggttataatttaatgtcagttcaactaaaatcatttgaattgattgtcactattcagcaataaattaagttcttcctctttcagctggttgggcttatttcttttttatacatcaaccttctgtatgttgatatatgtctcyctaatgaaataggaaaatcagctctatcaaaaacatagagtaacaaccagtcctggtgctggtaaagctcaggtattctgtatataaggaacattctctttatcattttatggaggtagaaaatccaaggataagcagccagattcatgttttagatgtaatagggtagtggtcggaattgcgaacagtgaaagtacaaatcatgcctattgttgaatagcctgtaccttatggtttaaggtcaacagatgaatacagaaaatggctttaaaactatacttgccatttgtaggttaacagcctagtatccatccccttacctttttctcttcctacttgaacctccgttttcccaaagaaacattccagctccrtcctatcagcatatcacaaatctctggacacagtggtttggtctatgtgatgtaataggaggacacatatattggatgctcagaatgactcttcctctttcttctttggttcatgttcattctctctctctctctctctctcttttcttcttcttcttcttcttcttcttcttcttcttcttcttcttcttcttcttcttcttcttcttcttcttcttcttcttcttctccttctccttctccttctccttcttccttcttccttcttccttctccttctccttcttctccttcttccttctccttctccttcttctccttcttctccttctttctttcttcttcttcttcttcttcttcttcttcttcttcttcttcttcttcttcttcttcttcttcttctttcttcttcttctycctcttctccttcttcttcctcttcttcttcttctctctctctttctctctctctctctctccttctctttcctttctcccctcccatgttggatgtgcctgaagtatgaagcggttcttgctactcgtcaactgactttccttcacaggaaggccacacttaagttgaagttgacactctaagtggcagaaagaaagcatcctagccaatttagaaccatcttatttaaaggcaggtggsaaaactaatttaattgcctataatttctttaccatttaagaattttaagccaaatwttgaatgttatactcttaaaatcaataccaataatatctatcagctatagagttcttactatgtgctaggcattgtcctaggtaatttatatttatgtctgtttaatctgcacaaccgtattatgagttaaatattaccatctccatttacagatgaggaaactgaggcactgagagtttaagttacttacacaaggcacacagctagcaagtggcagagtcagaattcagtcccaaaggccgtgctgctaacctactaagtcatgatgagacattgaatttgtagaaggctattctgaagatcatttaggtcttcatcctgaatatcctaaaagcagccccttgaagacactttcrcaggtggagcttttgagtactagataagttaawgtcttggtcatggttatataataaatgggatgaaaaaggcagcgatggtgtgctagaaaataatttggatcggtgaacacaatttgctccactgtctttgaggccagcggcccctatttgcttctctgtcttctcagtatccccaggcattctgcctttccatctttgaccttgtcattatcaattaccatgttctgggaatccagatggtgccttgtctgattatcctcactgcacaccaagaggaatgatcctttacatttctgctgtggcccataactcaccaagagtcttctcatctacartctcatttggacctttcagccaccttatgagatgggctgatgcactttgtcttaggtgcttatatgtcaatttgctttacattaattygcatttataatcatcttaccttataagcaagtgattcttgcttctgtmttgcatgttgctgaacttgcagctggactataagctccatgaagagaggattwgattataggttttatgcttgacattccttcagtagagttccctcttagttcacaggattctctsaaaaacaaaaacagctcctgaaaaagaactcattaaattattatctggctttccagagtcaatagttaaatgttcaggaatattgtcagcaggttactratctgttagcagtttgacatctatggtaagattacttataccacaaaacttgggaaaggctacacatcagggtaactcttcatccctgcccactgcccccatcccccatcccccatcccccatccccaccagagagccagttagccaggacactcctgtttatagcatttccataggaaatgtggtccacaggcacctgccttcctttcccctttgtggattakgtagtagccatgggtcaagtgtttacactaggggagaaggtggaggtgaggtcattctgctggtctccatgcctctgctgtcatgactctctgagcagaggttgacagtttatgttcactgtagaaaacccaactacagaaaacagctcagagaaaactggattgggaagcccagaatgggcatcacttgaaactggccgcctctctgctccagcctgtgagtcctcccacccatccttgattgaactagttaactgatcaagctgtgtttatagggatatcagggtaactttgggtatcaggtaaaagcattcctgattaaaagtggtttcaaccacaaggatcattatcatttacttaacagaaagtctagaaataagaggcccagagctggttcactgtcttagcaatgacctcaatgaccccaagctgtttctcgtcccctctctgccaccctctgtgtgtgaatagtgtttccccttctggctgcaagaaggctgcagtaggactaaacaataagatgctaatacaccttctaaacccttgagaatattttggatttgtgatagaaacaatggaaatcttctcttttttctttttcctgaagcaaggatattattttctccttaaataaggtgtaaaaggaataaaagggaagtgacaaatcttacagaatattaaaaatagcttcawggtaaaataattttgaagtatttatttccaattaccasgaaactccagtgattctatatgatggcaccattaaggaagccagcaacccaagaccatcatagaagctgtgatgtgaactgaaggaaaaacattgcaagaaaaataagcaaatgctttcattatgacatccaaggcagtaaaaatgctatttaagtagagcggaaggcccaaatgcctgcaattatggagtatttaaatttttttcacattgcaaaaaattaaaatatttatacttttatggaaaggaaaattagataaagctgtcacataagatactgaaatcctaggaattagtgtgcatccctgctctgagagacttgctcttctttgtttcttattgctagcacagtattgggcacaccgggtatacagaatgagaagaaaagacagcaaaggatgcatatagtagaactatagaaccaagtagaaatcgatcttgtcagaaggaaacctaggcctgggttattggaacacagatggattggcttcaggtggatttgaggagttgcaggtgcttggatctcatattttttcattttctgcagaggaaacagagttagcccagaatccaggtgagttgacagttaagcgcagagagcttcccagctaggatcactacactcacatttccttagggccagttttstggttcagtctctttgacaccaaatgttgtttttccttcaatactgttggtgacaattaagttatgaaatgattaatgtcgattcacaggtggctgatattagtatttgccagctcaagttttttggtgtggaaggtacaaagtaattcaaatgagaggctggattagagggcagctgtagcattcatgccagttgcatcatccacttaaaatacagaaggaaggcattctaggctgagaaggtaagaaagtactatcacacaaagtttaggatatgaaggaagtcttgtaatctttctgtaagattttaatttttaaaaatagtgatatgtgagtacatatggtataaagcttttgttggaaatctgtcttcagtgaatcagaaatgaaaaatttgctttaagtgttgaacatcacaatctattttcatattttaaaaaactacaactattccttagaacacaataggttttgtctttttttgtagaagtcttcattaggcttcaggcacagagtaaagaggaagaagaggcggctatatatgcaagtagtttaataaacattatatatcatgatcacaactgcacatcctaagtgagatgtataaatttagtaaaaattggaagcactatatttgtgaaggataacagcttagaacaattttaatttatgtagttaaaccttcaagttatgctttgcatgtggattctcattaaatgcatatgttcaagttaccacagtgagtttattttactgaatgttgactactttttctggggcagcatctcccctttcacaaagaatatgtgaaaggccaagggtgtccaatttcgtaagtattgctgtgagttttaaggttgtgctattttgtattccatgaatttgttattgagtttcatagaatctgatggtcaaaagaaatgtctcctaaatattaccacagactgagtaatacatggattttaaaaaagagataatatgtgagaaaatgatatagtataataagtaaaactcaaggacaataataagtaataatgaactagatggtaatctctttgagttcaggacccttatttaataattactttcctcctccttctcttcctcttctccctccttttcctcttcctccttctgctcctctttctctttctttcattaaatcctacacaacaagtggctttgaatatcatatctactcaaaaaacagcttttgaattaatgagtggatacctaaatgtttttgtccctcmtcaaatctggctcactgtgttgggtatactgagtgattgataagcatttgttcaatgaagtttctgaattacagaattttttcactaaggagctgaattttacagtttttgagtttatattgtactgagtgagaaactatcacaatgttgttgggtaaaggttttaatggtcccactttaataaatacatcatttagaattaaacatgatattatgcaaatactgggaaaaggattgaaattaatttgttcaaatagatggttttctctttacagttttgtatatattttttcttgtttggttttatatatagttacttcctgacatccagccatttttactactttcatgattttttgacatacttgcttaccacctgtacggktatttcccaatattctctttaaattgattcactttgcaatctaaattcatttaaagagaaaacttatattagtaccgtgaacagaaaaccagtattctctgttgcaaacagaaggcaactataaaaatcaatataatgtgatgaaaatgacattattaaatattggccagttctgttgccttgagggagattgaggctgagataaattttcttaaagagagtttggcaaatattagagaagtattaacataaaagacatataagccaggtgtggtggctcatgcctataatcccagcactttgggaggctgaggcagtcggatcacttcaggtcaggagttcgagaccagcctggccaacatggtgaaaccctgacactactaaaaatacaaaaattagttgggtgtggtggtgcatgcctgtagtcccacctacttgggaggctgaggcagggggatccttgaacccaggaagcagaggttgcagtgagccaagatcacaccactgcagtccagcctgggtgacagagtgcaactccatggcaaaaagaaaaaaaaagacatatagatactaaactaagccttatttctgaccatgctatacgggttgaaaagaatttaaaggagaatgacttctttctatactggatcaaatacaaacttcaacaaagaaaaaaaaaatctrgatttttcacaattccaaatcagtagggcagtaatttgtgacattttagcactctgtaatttttgtgataaagtaaaaattttctgttcatttttacytttctttaaaacatactcagaattaagaacataggttagagtgaagcttccattttcctgcggtgcatttatttcctgctcagtgggttacatgagcaatgttgaggttttctatgaggtaccacttactgagtcaggtttatactttctgtatcattaatgctttgtaaagaatgtcattctaggaagtgcccacatagttacaatacacatgtgagtaaagtgtttcattaacactttagcgtcttatggaacaaactcagaagagcataggtataaatgatcaaaattccaaattaatgtaaatacagctaatgagtttttaggccatttttaaaatactttattctttagctattgctttggactggttctcttaatgttgataaagatcactctaggtcatacttgaaacacaatcagtttgattctcagctgaaagaattgatttcttaacaagtaaagtagtagttaatttagtcaagcccccactggtgtcacattaatcaaagtcaaactgattttgtgcagggatggaaaaaaaaaaaactggatcattggtttcccctgtcactacaggaaaagttatgtggctcaacatagcctggcaaactaaaagaagaaagaatgcaaatgaagtgtatgatttagaaatgttagataagatggtggcatgtgttatgtaatgcttcttaatgagaattttataaatgatttattacactgatgtagataaaaacatatttgaaaagcggaaaagtcaaagcagttgacatcttygatgagcaacggatatatattttactttcactatatagaaagcagccttcaactatatagaatatactgtcatgaccaatgattgatgctttataatcctgggaacagaggctgtttttaaaatggccatggaacttttgaatattgtttttgtactactaattgacttaaaaataacagatttaaattaaatcaagcagaaatgccattacaagacaaaaacaaggcttaggtaaatgttttacttttaatagtttgtctgaacaaacactgagattaaatttcaacataaaacacaaacagtttgaaataatttagagaacagcacatacttttcacaaatgcattgcaaacaatttagtgcccaggtcctgaggcatgagggagaattttaatagtatttataagcatgaatttactttaaaatatagatggttgacatttggcatgttttcttcttctttcatattcttatatccaagtgtttctaagattttctaaaaggaagctcattatttgaatcagtcagttgctaagtggtgcaacatgagggttatggttaaaattctacctatcatgttaatgttgaaaagatagtgttcaacccyggctggatatttgggtctacatgagaaattctagaaagaaccctatactctttgtatcatataatcaaatacctatttaaagcctctgccagaaagataaaaatggagcaactggtagagactgtacctcttaagtctgactttcctctgcttgcttgtctttctttgtttcattgtttttacactttcgtatgaaagccaaagaaacaattaatcctgacaagtagtgtggrtgattttcaggatctgggtgcctattataattttaagaggatctggtaaattgactcttttaggtataaatacagtgttttatggcaatgtagaagcttggcaatgctctgaacattgttaatctgcaataactactggaagttaggagttttaacaggagctctgttacaatgacttctagattggggcatctctgacttctgagtcctataattctgttggagttcttaagtaacagctatgtgtatcagtttaagttaaggagatacttgataacatattttaatatagagtttcacttggcatctttataaaagccaggtgaaaaagctttctctaactatgattacatgaaaattgtcttggcctgaactttcaaaaaatgcgaaaaatttattatcttttattaaggtgttaatccttaccacattaccctatggtggtctgaaacaatccactagtgataaaacattgctagaagtcaaaagttaatagtaaaaattaatgaaacaagttattaatataaagtaaagcagagtgatgggaagaatcaaggatttttccctarggggtaacatgttttcttatggaagaattaaaatttttaaagaagtagagcataaaacagactagaaacccttatatttttaccccccatattaagataaaaatctctcctacagtcatgagtgatgaatgtattctctagttttaaaaaggtgaggggtaattaaacaaaaatggcaactcattagcataartgaaaacaagtactgtatctaccatgccaaccagcaatttgtattaattttatatataaatakttctgagattatctggggaaaataatggccctgaaagaaaggggtaaagagtttgcagctctttgcctttgctagggggaggaattggaattgtttctctccaaygtagamttttagggaaagatgggttccaccttccatcaaggatcccagtgtctactcgacttcagttgacagactgaggctggctacgtaaaataaaagactgttactaagaaagaaggaaaggattgacactggtgagacatcttccacattgagttgattccagagctccataggaggcaaagaggaaaggttattgtattagtcagggctcctcagggaaacagatcaaataggggatgcgtatatatcatataatacaatggaacttgagactatctggtgagaactaagtataaagaagagaagacgttcaaggactgaactctggagaatattgagaggaggatccagcaatggaaactgaggaaaaaagaaaatgccagagaatgaagaggaaaaccagtaaagcactcttcacaggaagtcaagcaaagctagtgtttgacaacaatgctattctccattaagttaatactcttgagagactgaataattgagacacaaatatggcaagatagaggttgttaatgaccttgattcgaacagttcatgggagtagtggagacagacgtctgattggagtggattaaagaaaaagcgggtagagtagataccctttgccaaagaagcagataaatggacrgaagctgaaggggcaaatagaattaaggaagtttgttttgtttgtttgctttgcaaggtgagagtctttttacaacatgtttacatgcaaatggaaatgatccaattgagagaggaaaactgaagaggaagcagcaaaggaggggaaaattccagttgcaaagttcttaaatgttggtgctggaattcagtgcgctgtgaagagttggtttatatggaccaaggagatttcatccctcatattaggaggaaaaatgaagtgaatgggtcagttacaagtaagttagaagatttggtgatgggaaaatcaggagatgttcttctgattacttttagtttttcagttaaacagaagtcaaggtcatcatatgagagtgaaggacggtggaaggagggagtattgagggaggctttgaggccagaggaaaatacgtaaaacaaatttttgagagagtgggaaaatgaatttgttatggaaacatagaaggatgctgggtggtggggaggtctttctaagatttgtggtcrtaaatttaagaaaatgaaggcatttcttaaaattctttcctaaaagtttacataaaatcagttaattcaaatgaatgtttttctttgactacttccagctgctgaggtgcaagtagggagcagatagaaagttgggttttaacagagtttcagtttgttaggtgaacacaggagaaaaagaggataaggaatattggagttactaaagctagtgcatggagtagtcgtggagaggtatacagtgaactagttgctaaaccttaaatgcaagggagtgattgagaaaatagtagataactgtaaaagacttattgcaaatagaatcatgcttggcagagtcactcagatctacaactttgtggagactatgtctggttgaaatagttcacagcctggccttagggggattgaaacaatatatcataaccatcaattagcttagcattttatttttcattttttagtacttctaccctaaaaagacacataytgtctggaacaaagcaaaagcacaatctgtgttttcagggaattgacattctaccagagacctggtagaaaagatactagatgtagagaaagattcacaatttattttttttgttgttgtttaaatgggaacaacaggcacatcaagttgtttctcagctcttgtagagcagaatgtaaatatttatggaatataaaccccttttaacagtagcccagttgggcttctacaaatatggagttctctttcagatacttcaaaatactaggccaaaaaaaaaaaaaaaaaagttcctagcagtaaagttgtaatatatcagacataagcagaaattcccaagacttcacatacgtaatctgtgatcagcacaaaatgatggtttttttcctctttatcttcttcttctttctcctccttttcttcctctttcgtaatgattaggtaactaagaaagtgataaaatagtatctaggcaaatcaataattgtctctttccttcttttcttcttcatccctttctttccttctttaattttttaagttaatgactgtattgcttttataaaagtaacatatgttcattataaatatacaagcaatagaggaaagtccagagaaacatgtaataactcaaatttcacctactagacataatcattataattttgaaggttaygattctggaaatctctctgtgtttatatgtataggtaaaaggatggatagcaagaactgatagccaagttatttttcttcatccttaaagttggggaaaaacaatttcactaaagcactttcttacagatgatcatttataaatttttccaggaatttctcgtgtcctttcaatatacaggtttattttttacctcaatatcggtgaagctttgttgtaccatatcttttaatacattttctgtcacatttattgtcttacctatcttttctatcttctgtatatattacttttaaataattgtttttgtttctgtgtcttttatctgcattactgtgatgtttctcaaatgtttcctctagtgagtaatttagttttcaaccttgtctattcatttctttgatcttattattttattaatgatattcttttgccactcactctgttttattacttctgcaatctttctgtttcattttgttatttcatcacctggttctagagctatagtarttgaattcatatccatataactcattttattaaagtatttgtggtgaattttcataaaaatatttttaaaaggtaagagccactatttaaataagtgctcttatctgatcataattgcaactattgattggattcgcctagtttgagtactttttattaataatgtatgtgtttataaagtccttaaaaaatttactgagaatgaagggctccactcagcaaaatgaactgttaaaattgaactaaacaattaattaatgtaagtatatatacagaaaaattcataaatagtgtacagatacacctacatattgttttggagttaattgtcaaggtgttggtaaaacccttaaccacaagattctaagaatatctctagctggttgtagttggattatctctctgttatggtcttagttcccatctatttagtaatcttctgtatcctatgctgacccatgctggctcatgctggattggtcattttcaaaactaaaagcagatataattgtagaaaacaattagtctgtctaccattgttcaagtttagactttgacgtgttacctcttcattaactcaayttctgtagtttagtatctgttctatttgacacgacacagctacacataatatggagtgctccagagagttgcagtactcttctagtacacaaattgcaaaaatttcttggcacaaaatgtcctccctttcttctcctgttgtggaagaggttttatagactttcttcatgtgggtgggaagggactaattctccatctggatgccacctgtaaaattcacactttttctcagaagaaatttaatctatagcaccaaactatttcatgttcttttaagcagtccttgtcaccattctctaggagctaagtgtggagattctttacaggatgttttcctaagatgttgctgtttatagaatcaatgccacttgtatttaaaattcatttaacgaagtaaacatcaaccatcagttgtaaagtgtcccatgcaaaaataatcatgctatgtcttcatgagggacaacttgttgaaagtacattatgatacatttgattttgattatgtatttggttgttatctagcctgtcagtcaactcactcccacctaactggaggactaaaaagttaagtgtccctggcagagcaatggaacagtgcagtgtttctcaaattgtttgaaggctatctgtactaggatcaccagagagaggttagaccagatcttagaccccaattccccagacctctgggaatttgacttaagaacatgcagtgtttgagaaccatagtattagtattaatggtagtagtagtattagaagttgcctgtaagatcactagagaaagtgaactttattaaacaacatagaaaaactgcacaataaatttatatctgtgcaaagaggaatatatacaccatcacttggttatgctttcaatgttttaaaatcattcctggctgaaacctasggtttctgaacaaattcttaaaggactaccttggaggtggaagactgagtattagtggactgtcctggtcaaggaggcaatggcagtaacaaaaatgcacaaaatcttattatcactcccagataaagtggtttactaattattatacttcgagagctagccatggcagaggtttcctraattctgtctcaagtacccactgccaagagcagttgtcatcttttaggaggaagatgtcatatagtgttctcctgactctcaaacttgtttaatctgggatatgtacattgcagtagaaaagactgtggatatttcccagctgggtakgaggaagaaattttttctggtgttgccagttacctggtattctgcttatccttaaacttgatttatacccacattccagcttacttgtgggtaagcttagccatattgckttgatgatgcactctgtcacagcctcagcaagtatataatgtagattcagtaatgggtatagatccttatttctactcttaaaatcttctttactgaggcatgatttacatttaacaacatgcatccattctagtttgatgagttttgacaaatgtatacacttatgtaaccaccaccactataaagatatagaccctttttattatccaaaaatgttctttctgccactttgtagtcacacctctctcctaccagccacaaccccaggcaatcaatgatgtgtgctctgtcattacagattagttttgcttattttagagtttcatataaatggaatgatacagtgtgcctatctttttttgctcagaaaaatgtttttgaaattcattcatgtaattgcatgtaatgataataacaatactctattctcttatcattgcctagtagtattccattgaaaggatgtatcacaactgggctatccattgacatactgatggatagttgggtttttttccagttttgtggctactatgaataaatctgatatggttattgtggcagggttggcatatgattattactcttggaattgttgggtcatatggcagacatgtgttcaacgttataagaatctgccaaacagatttacaaagtagtggcaatattttactttgcaactagcattgtatgagaattccactcgttctagccttttaatttttagccattctaatgactttgtaatggtaactaaatgtggtttaaatgtgcattttttgatgtacttagtggcctttgtatttttatgaagtgtctgttcaaatcttttgacagttttttaaatgagtttttgtcctcttgttgctaagattcaggttattaagttctggacacatgtatgtatacaaacacatgtaattatagtctatatttctatattaacgaattgatataatttatcacttttgggtttttttgcaaagttttctccttttaggagattttttacatttaggtctgtaattgataagttaattttgtatatgatctgaggaaaggtcagagtttatgtattcatatgcatatcttgatgttccatacaatatgttgaaaacatttttcttcctattaaattatcttggcactttgtcagaagctaattgatcatatatgtgtctatttctgacattctgtcatctattgatcaatacatctacggttaacaccaatactatgctgtcttgattattgtagtgtttctgtgagtcttcagatcaaatcatgcaacttagttcttttcaaatgattttggctattgtggatcctttacattttaatatgtatttcacaatcaatttgtagatttcataaaaaagtctcctaggrttttgttttgtaaataagggtgttttagtatagtaaaaaaaatataaaatttgctrttttaaccatctttaagtattcaattcagtggcattaattacatttgcatcgtcgtgtcaccaatatttccagaattttccatcaccccatacagaaactctgtacatattaagcaataactcctcattccctccagcccctggtaatctgtaatctactttatttctgtgaatgagcctattctagggaaattttccaattctaggtatttatacaccatataagtggaatcatacaatattttctttttgcatctggcgtatgycacctagtgtaatggttcttaaaatgktttttatttttaatttttgtaggtacatagtaagtgtatatatttatggggcatgtgaaatactttgatacaggcatgcaatgtatatcgtcatagtaaatgggatatccatccccttaagatttatcctttgtgttagaaacaatccaattatattattttagttatttaacaatgtacaattaagttaktattgactatagtcacccttttgtgctatcaaatactaggtcttattcattgtttctaattatttttttcacccattaacaattcccactccctgccccaccacatccccactaccattcccagtttctggtaaccatccttctgctctctccatgagttcaattgttttaatttttagttcccacaaataagtgagaacatgcaaagtttatatttctgtgcctggcttatttcacttaasataattacctccagtctcatccatgttgctgcaaatgacaggatcttattctttcttatggctccagtactccattgtgtatatgtaccacattttctttattcattcatctgttgatggacacttaggttgcttccagatattggctattggctattgtgaacagtgctgcaacaaacatgggagtgaagctatccctttgatatactgatttcttttcttttgggtatatacccaggggtgggatttctagatcgcatagtcactctattttcagtttttgaggaattttcacactgttctccatagcagttgtaataattcacattctcaccgacagtgtaccagggctcccttttcttgacattctctccagcatttgttactgcttgtcttttggatataagccactttaactggtgtgagatgatatatcattgcagttttgatttacatttctctgatgatcagtgacattgagcaccttttcgtatgcccgtctgccatttgtcttcttttgagaaatgtctgttcagatattttcccctttttaacatcagattattgtattttttcctatagagtttttatagctactgctatattttggttattagtttctcatcatatgggtagtttataaatatyttctcctattctgtgggttatcttttcactttgttgattgtttcctttagtatgcagaagctttttaactgatgtgatcccatttgcccatttttgctttggttgcctgtgcttgtgcagtattattcaaaaaatctttgcctagtccaatgtcctgaagattttccccaatgttttcttatagtaatttcatggtttgaggtcttagatttaagtttttaatcccttttgatttgatttttgcatatagcaagagataggggtctagtttcattcttytgcatatggatatccacttttcccagcatcatttattaaagagatgatttttctccaatatatgttcttggcagctttgttgaaaataargatttgtttctgggttatctattctgttccattggtctargtatctgtttttatgccagyaccctgctgttttatttgttattgccctgtagtataatttaaagtcargtaatgtggtttctccagttttgttctttttgctcargatatctttggctagttggggtcttttgtagttccatataaatcataggattactttttctacttttgtaaataatgtcattggtattttgacaaggattacattgaatctgtagattgctttgggtagtatggacattttagcaatattgattccttcaatccttgaacatggaatgtcttcattttttttgtatcttcaatgtcttttatcagtgttttataattttcattgtagagtttttttcagttctttaagttaattcctttgtatttcgttttatttgtagctatattaaatggaagaactttttttctttttcagattgtttcatgttggcatacacaaatgctactatttatattgattttttattctgcatctttactgaatttgtttatcagttctaacagttttatggtgaagtgtttaggctttaccaaatataatataataccatctgcaagtaaggacaatttgattttttcctttccaatttggacaccatgtatttctttctcttttcaaacagaaaacagctctagctaggaaggacttcagtactatgttgaataccagtggtgacattggagttctttgttgtgttctagagcttagaggaaaggctttcagttttttcccattctgtataacactaactgtgggtctgttatacatggattttactctgttgaggtatgttctttctatatacagttcttgagggttttaatcataagaagatgttgaattttagcaaaaggtttttcagcatcaatcgaaatgatcatatagtttttatccttcattctgttgatatgatatatcacattgattgattagcatatgttgaaactgggataaaccccacttggtcatgatgaatgatctttttaatgtattgttgaattcagcttgctagtattttgtgaggatttttstatcaacattcgtcggggatattggcctatagttttcttttttgatgtgtctttgtctgattttggtatcaggataatactggatttatagaatgaattcggaagtatttattcctccatttttgaaatagtttgagtaagattggtattagttctttacatgtctggtggaattcagcactgaagccattggttcccaggcttttctttactggcagkcttttcattacagcttcaatcttgttactttgttattggtctgttccatttttgggtttcttcatggttcaatctgggtaggttgtttgagyctaggaatttatccgtttcctccacatattccaatttattagcatataattgctcatagtagtcactaatgatcctttaaattyctgttgtatcagttgtaatgtcttcttttttctctctgattttatttgtttggatcgtctctttttttttttttcttagtctggctaaaggtttgccaattttgcttatctttaaaaaaaacaaacttctggttttgyttatcttttatgttttcttcatttcaatttcatttatttctgctctgatgtttatttttttcttctaataatttggggtttggtttgttctagcttttctaattttttaagatgcatcatcaggctgtttaagtttttctttttttgatataggcacttaaagctatatattttcctcttagtactgcttttgctgtatcttatgagttgtggtatgttgtgtttccattatcatttatttcaagaaatttttcagtttccttctttatttcttcattgacccactggtcattcaggagcatatgattcaattttcatgtttttttttttagtgtacaaaattcctgttgttactgatgggtagtttaatttcattgtggtcagagaatatgttttatattatttcaatttcaattgtttttgaatgttttaagacttgttttgtagcctgacatatggtctgtctgtgagaatgatgctgagttgaagaatttttattctgtagccattggatgaaacattctgtaaatatctattagatgcrtttgttctatagtctggattaagtctgatgtttctttggacagatttcccaggcagaaaatcaacaatgttgaaagtgggatgttgaaatctccagctactattgtactgaggtctgtctctctccttagctctaataatatttactttatatatctgggtgttcaagtgttgggtacatatctatttacaattgttatatcctcttgctgaattgacccatttgccattgtataacaatgttgtctcttcttatagtttttgtctttaaatttattttatgagatataactgtagctactcctgttcttttttggtttacattgccatgaaatattmcatttatttgtttttagtctatgtgtatctttatagttgaagtatgttttttataagcagcagatcattgggtctttttttaaaaattcattcagccattctatgctttttgattacagagtttagttcatttacattttatgttgttattgacaagtaaggactttctgttgtttttctttgtcttgttgtactgtttgtgtcttaaaaagttgttgttatttttgactggttcatcatttagtcttttgacttaagataaacatagtttacacaccacaattacagtgttatagtattctgtgtttttcggtctgctttctactatctgatttttgtaccttcagatgatttcttattgcttattgtccttctctttcagattgaagaactcccattaacctttcttttagggcaggtctggtattgatgaaatccttcagcttttgtttgtctaggaaagtctttatttctccttcatgcttgaaggatattttcacagaatatactattccagggtaaaacgtttttatccttctgtactttaagtatgtcatgccactctcttctggccagtaaggtttctactgaaaagtctgcttacagatgcattaaagttctattgtgtgtgtgttttttttctcttgctgcttttaggattctttatctttgaatttgattattaaatgcctttaggtagtcttctttgggtaaaatctgcttggtgttctataaccttcttgtacttgaatatttatatatttctctaagtttggaagttcttttatattatcccattgaataaacttgctaccctcatctctttctctacttcctctttaaggccaagaactcttagatttgcccttttgaagctattttctagattctgtaggcttactttattattttttattcctttttattttgtctcctttgacagtatattaccaaggagcctgtcttcaagctcattaattctttctttttgwtgagcagttatgttattaagagactctaagacattcttcaatacatcagttgcattttcaactatagaatttctgcttgattctttttaattatttcaatctctttgttaaatktatctgatagaattctgaattcttctttgtgttatgttgaatttctttgagtttcctcgaaagagctattttgaattctctgcctgaaaggccacatatctctgtttctccaggattggtccctggtcccttatttagtttgtatggtgaggtcatgttttcctagatggtcttgatacttctgsatgtttgtctgtgtctgggcattaaagagttgggtatttattgtagtcttctcagtctgagcttgtctatgctctatgctcattcttcttgggaaggctttctagatattcaaaagagacttgggttccaagccgagtaatacagactcataaagataccacctaggtggtcttagataaggtctggaagaattccctggattaccaggaagaaattctcgttatcttctgctactttcttttaaacaaatgaagtctttcttkctgtgctgaaccacctggagctggggatggcatgattcaagcacccctgtggccaccaccactgggactatcccaggtcagacctgaagccagcacagtactgagtctcacacaaggtccactatatttgctacctgactacgacctatattctctcaagattctagggatctacaatcagtaggtggggaagccacagattttgtcatttccttcagggcagtcagtttccccagaacccatgcaggtctagagatgctgtctgggagccagggattagaattaaaaaaaaaacktagaaatctacctggtgttctgttgcattgtggctaagctggtactcagaccataagacaaagctctttccattcttctttcccctttccacaggcagagaagcctttccctgttgccaccaccaccactagcccatagggagtttttccaggccaccactaagattcacttaaggcccaggggctcttcagtcagattgtggtcaatgctgccaggcctggggctcactcttcagggaagtgggctcccctttggcctagggcaggtctataagtgccatccaatagcctattcctggattcagggatccctamgagcccacttggtgctctgcgctactatggctgagctggtagctgaagccagcatgtctcagagtcttacccaaggccagtggtataccacctgagtattgctgttggtgattcagggttcgggggctctttagtcagaaggtgatgaattctgccagtacttgttcattcccttcaaggaagatgtttctcttctggccgagagtgtgtctagaaatgtcatctgggaggtagggcctaggatgcaggcctcactactctgcccactgatctaccctatgttggtttagctggcatccaaggtgcaagacaaagtctctttgctcttctgtctcctctcctcaagtagaargaaggagtccttttattgctgcaagstttcctkcctgyggttgtgggaggagttgcacaagcactcycctagctggcccatctggtgtctttctaggccatgtgccaccccaatccactggctctaagtccagcacagcatcaggacttccctaagaattgcagtccttgtgtcctcgactgcctttcaagttcacctaggatcccagagcagtttagcctgcagtagcaagacttgcagagaaactcaggttcagaccattgagatgggcacttcctctctggttaggtctggtccaaatgctcccttcatgtgtgggcactggctgagttcatcacgcttttgctttccactgtgacagggcaaaactcagttcaatgcaaagtcccccagtcactgtgctctccctcccccaagtgtacagattctctttctatgccatgtaattatttctggggaatgtgagaggggtggtctcagtgatttaagcctgtctttcctacccatttagttcctctgtcagcaatataaaccaggtactgtgattgcttacctgatttttgttttttatgaaggtgcttttattgtgtgtagtcagttgttaaaatgtggtgttccttttaggtgagacaatttgtggagacttttatttggccatcttgctccaccctcagcataatattttcaagattcatctatgtcgtagcatatgtcagaactccattccttttcatggctgaatgacattctattgtatgtatataccacattttgtttatccatttacctgttgattgactcttgggttgtttttaacttttgcctattgtgaattatccagcaatgataaaaatatctgtatgagtccctgttttttattatgtatatgcctacaaatggaattcttgggtcatataggcctagtgggattttatttctgattatactgagtttatagaaaaatctgsagtgaattcgtatcttaaattttaacctcaagtcgtctgatccatgagcactgtatatctctgtcttagtcagcttgggatgccataacaaaatatcatagactgggtagctgaaataatagaaatttattttctcatagttacggatgttgggaagtccaagataaaggtgctgggaaggtaagttttattttgaagtcccttctcttagcttgcaggtggccaccatctcactgtgtgctcacatgacctctttgtgtacacacacacacacacacacacayayacacacacacacacacacacacggagagagagatggcacgctctctggtgtttcttcttataaagacactaattaattatgagggcccatcctcatggcctcatgtaaacctaattacctatcaaagtacccatttataatactgtcacattgagggtttcaacatataaactgaagtagagaaggggacaaaattcactccatagaaatatccttatttaatttttctttaatttttcttggtaataatttgtaatttttaatgaactgcctgtgcccacctgttgttagatttaatccttagttttacatgatttttgatgctgttgtgaatatattttgttttatttccaattgcctattgttaatatatagaaatacaaatggttgttttctattgaacttgtatcctgcaatcttgctcaattaacttattagatttagtggctttttgtagatttttaagattttctacatgcacaatacactctttctgaataaagacagttttatttcttcctgtcttccttatgtgtcattttttctttttgctttattgaactgggacttgcagtataatgttcaataagagcaatgagagtagacattcttgcctcatccccaaccttgtcaggagagcataagagcttaggacattgtatttgcatttgtatatttgtaactaagcaaggcactgtgatcagtttattggctacagtttttttccttactcagattctgtaatcactggttatagtagctttaggcactttaactctgtttcaattagagaagttcttatttatctataattttatatatttagctgctgcatatttttttcagattccatagcttaaaatcattttaaaattactggtataatgtcatgctattgacttttattaaagttcaaagcagccactgaacctcactgatgaaaacactgtgtattatggaacttaatttttcttggggaagggccatgagagaaattcctactgaaattttagtactaaggctacactgagtatcagcatataaaaatatagaccatacactttccctctaacataatgagattttaaaaatcaactctgtttccatttttgctttagtagaagttcacagttaaatgttttgcataattgtggccatcatgatttttttatttgcatccttttttcccagtatttgcatatgttttggtttattttaacaatcttaatctatttatgtcttttgttgtaagtcgactcaaatcctttttaaaaaggtttagattaaaaattataatctctttgaattaataaaaaagctatttcataaaaggccctaccttttaartaattaatttgtgtaaatacctacttttaagaggcttaatggaaagctataaatggaaagtctctaggcttcggaacacagtcttttactggccttgtaagataagctgctaaagagaaacaattggagtgatgatcttgttgaagtgaagcaaaaatgcttctgactaaaacaaagcgaaacaacaaacagagatttgctgtttccttcaatgattaaagagaaatgattgaatgtcctgaaaataacctagtaagtggaacagtaaagattcacatgtctcaggtttctgggtggtatggcaacaagaagttgtgaggttactgccagtcatttcagtctatcttgtgctggaggaaatggcttattttgtatcacaataattagaataatataaaaaatttaatccacatagcaattattagttaatatttgtactacctaattacacaaatgtacattttacatttacattatacattttaattcttattgtaaattgtcttaagttaaactatatataatgatgattttaaaaataaagaattgacttctctaacaccctaaatgtttaatttttatatgtaattatttggagaaaaaagcaacatttatttttaaaacatttctattgtgtttagtattaaaatgtgcttttaatgtttgagagaaatgctttgtgccaaattcaatgccaagtacttgaaatgcattattttatatttttcacaacaatgctattgtagcaatttcacttatgcccatttacagatgagaaatggaggcttggaaaagtttattaagttgcccaaggtcacacagtaaaaggcagaascaggatttaaaccatggctgtcttaagtagcatctccattggaaagcatttgtctgtaagtaacggtaacgtcaacaatcttttattcccacatcaagctatctgaaaacaggggattgtttgcataggtttagttgcttaataatcctgtttaatcctctgttccaccattcccattgagtttgtttttcattttcatgctttttatttcacggttgcaaaatacataatgcaagcctaggtattgtatgttcaggacatgatgaagggagaagtgacaatgccagccatatttctcctttttttttttttaatcaygaaagcaaaatcttttcagggaaccctctggtgggttttgcttgtatctcatcagccagaactgtgtccagggcaatgcttagctgcaagagaagcaggaaaaataagtatttagtgttcctagccacagaagaaggtggctggggcctgggaatgagtatggttggccaaacaacagtgtctgaggcaatggrtattaaataatgctgattctcttaggttagcactagtggaatatatrtatgaattttaaaggcaatgactgaaatggagacagtaaaggagaatattttacttctctttaaggttttaatccaattttccrccmgagggcttcggggtgcttttctctgccttcctatcccccwttttttttttgagtcagggtcttgctctgtcacccaggctgkagtgcagtggctcactgcaacctctacctcctgggctcaggtgatcctcccacctcagtctctggagtagctgggaccacaggcacgcaccaccatgcctggctatttatttttatttttatttattttctgtacattttgtaaagatggggttttgccatgttgcccaggctggtctcaaacatctgggttcaagcaatctgcctgccttggcctcccaaagtgctgggatcataggcatgagccaccgtgcccagcccccagtagcccatttttgcagtgctatattatctttcctgaacatgcccttgaagtggatacagtagtgcgtgtcagggtgagaggatggcaagaaagaggaacaagaacctgacccctgctctagtttaggatttagtggaaggcaaggcaaacgtatagttgaaagggtacaggacactgtgattagaggtgcagatttcagcttattttcaaagttataaaaaggagataagcttgaataatcaggcattgttaatagaatttaagctggcaagctttgaagcagagttatgatttattatcttgttaacctttaacttaataatcagaataatttaaaagataagaaaaaagtttaaaaaaacagattcagtgataaaagattaagagaatttaggaaatttaacggaaaataataactgttagtaaagttataacttgtattggttaattaatgtacttaggtttgatttattgtaccctaagagcctctatgggatctctgtacttaggaaggttaatattaataaggataatgaccaaatgaccatcatcatgtctggtccctctggaaatttttacagatgggatatagttttatatgtttgggagaagtttagtgaggtcattctttcattcaaacaatcatatattaatgcatagtctgtgccaggaaatacatttggccccagtactatagaagtcacagttcttattctcaggagcttgtgatctaggagggagtttgtcttccattacccatttgactctctcactttatggacctactggtcctacctaaatgccaaagccaacttgactatttgagtgrattcactggtcaaattggacagaaatgcaaaatgaacagttaataagaatattcaggttgcatgtatatagtttgtatgttcctgttatccaaaataaaatgtagaattacttacatcaactaaaattctgctcttccttactgtacatactaagaactcattgcataatgctgttgaatttgacaaaaatctgggaattactaactcaaaaaaatatggctttgctggcagaaaaatgatttgtacaagaacacccaatagagtacctagcacataataggcacataattaataattttacaagcaaatgctgctgaatgaaagcaaatgaatcaccatgtctctgtagattattttacaagagttagtaggacttttataactaaattctatcacttatgaaaataggagacattttagaaaagtagtttgtgttggttacttaagtcaagttaggttcaaattattgtgycttaagwgcttctatagcaattttgctggaaatatgtaaagtggtgcatgaaagttttctcatggtatatctaaatcctctgtttaactgacaagttcttttgatgtcctttgcacaaaatgacgcacgtcatttcgcatgaagggtgatgtgctagctggcaattgtttgcttcctgcagggttttgatggaagtgttttgtgatagtagcttgrtatatattcctgacttttagtttgaaaagctcagtgcatctgtgttgtcattttttttttttaaacgaagagctttagtgtctttaattttgaaacacccaaattttaaatctctgtgccaagatggagaggaccattcattaatgtagttttctgcagtgtcattttctttaaatcacaagattatttccacacacatgctaattttaaaattggaatgagtacctactcccataggtatagagaagaaacctatttattttaggtgttgtaatttgataagaagttagtttaactctctggctgttgagtaatttataatcatgctttgtctgctcaggtrcatgtgttggagataaaactgtaaacaagaaggccgggcgccgtggctcacgcctgtaatcccagcactttgggaggccgaggcgggcgaatcacgaggtcaggagatcgagaccatcctggctaacatggtgaaaccccatctctactaaaaaaaatacaaaaaattagccgggygtggtggcaggcacctatactcccaggtactcgggaggctgaggcaggagaatggcgtgaacctgggaggcggagcttgcagtaagccgagattgcaccactgcactccagcctggacgagagagcgagactctgtctcaaaaaacaaacaaacaaaaaacaaaaaaaaaaactgtgaacaagatatgcttcttgtccttaaagaacgtaacacttaatatacaaatattgtggtaggtgttgctataggagaaaacagagtttggtggatgccgagcaggaggtacatgagctagtgggatgagagtcaasgagacattgggtgtttgtgtgggagcagccacatagtgaaatcactttcagatctctaccagcacgtctccttaggtgtttgagatctgaagtcactttcagatctcaaaaagaaaagttttttacacgactaaaagctataacacctttatattaaatcagattccaaatatggaaatgatttagaatattgagaggtagcctgatggagtagtgcttgaaagctcagactctggagccagactcataggttcaaattctgactttgccatttattgattctagggatttaggcaagatacttcttttacgcgcagttttcccatttgaaaaatagggatgatattacctaactcataaggttgttatgaggattagatgaattaatatttattaaaaaagcttgaaacattgcctgatgtagcaagtgctatatcaatgtttgttaaataaatattgtcatacaaatatagaagcacttaaacacaattaaacattttcctgttgtctttgatatgacttatgtcttctgtacttttctaagtcaatggaggtaattctagtggcctgaagctcatgttaaatggtgttgggaaatgggttaaacattgattcactatgatctagtctcctctactgagaggaaattatttctgtatattaatgtatatggatattttctatacatttgtgtatattaataattttgaacatttttcaagaggtctgartaacaaatataaaagtgcatagcttctcagagaccactacatttatgataacagaaacagacattattatgaagaaaagaaaagtaaaaataatttgggctttagtaactttaagcatcagttaacttctttagttgtatttaggatgtactctaactataagaattaattcaaccataataaaatatgacataaggataaaaagaattttctttctcttgattactaaagcaggttatgataataaaagtgacttgggattacagcctgtgtgtggtgactcaagcctgtaatcccagcactttgggaggcagaggcaggaggatcatttgagcttagaagtttgagaccagggttgaaagaccctgtctctacaaaaaatgttttaaaaaaattagtcaggggtggtggcacatgcttttagtcccagctactcaggaagttgaggtggaaggatcacttgagcccaggaagtgtggaggctgcagagactgatgattgtaccactggactccagctgggacaatagaacaagaccctgtctaaaaaaaaaaatgacttgaatttttgaatttttatacatttaaccctcatgaaaaaggaattatatatttttgaaaaggtgattagaatattttaacaatcttttagtagttctgcttcagttactgctatgatttaaatgtcccctccaaaacttatgtygaaacttaatccccagtatgtcactattgagaggtggggcctttaagatgtgattggatagtgaggaacctrcctttattaactgattaatgtattcatggcttaatagataaatgggttrtcatcagaagtgactggtggttttatcagaagaggaagagagacctgagtaagcatgctcagtttcctccccatgtgatgccctgccctgcactgccttgagaccccacagagaatccctgccagcaagatggctctcaccagacatggtcccttgactttggagacttctcggcctccataactgtaagaaataaattattttccatataaattaaccagtttcaggtattctgttataagcaacagaaagtggactcagatagttactaataaactcaaattgtaattttgcttctcagatctttaaaatacataagagaaaaacatttagtttgagatcataataaattaatgagttttctctttttattttttatcattctgtccagtggcgaagttattaatgataaccagatactttagtttgaggttgagctgattttartttgtggatgttaatccaaaagttgccaacagaaagacattctgtgactaattcaagctattgagcatagggccttataccctgtggaaaaagacatgatgtgggcttcatgcacgtgacaaggaaatgggaaatattaatatatataaagttggccaaaatatgctaaaattgtttgcttgtgcttcttaaaactctcatttgtgtcaataagctcagtaaatgatctctaaaagcttttcttctacttcatgcatgtgtgtgtgtgttgtgtgtgtgtgtggtggaagaatttattggaaactgggagtataattatcaggaaacttttaattacataaaatgaggcatatgcaggtatatatcacatgaaccaaarggtgcatcygcctgaaaggtctaaaatcattttcagaaccaaacaggttataattcttactcctaagtaaaatggtaaaaataacagaattattcaattttagggttatcttttcaaggcaataacttcataaaaaagaaacttgattccatagataatagggagtcataatgtattactgagtagggtaatgacaaaatctatattaggcagggttctctagagtgacagaactaataggacatatttatatctatatataaaggggagtttattaagtagtattaactcacatgatcacaaggtcccacaataggctgtctgcaagctgaggagcaaggaagccagtccgagtcccaaagctgaagaatttggagtctggtgttcaagggcaggaagcatctagcacgggagaaagatataggctgggaggctaggccagtctagcttttcacatttttctgcccactttatattctgactgtgctggcagctaattaggtgaacccctgattgagggtgggtctgcctttcccagcccactgattcaaatgttaatctcctttggcaacatcctcacagacacacccaggatccatactttgagtccttcaatcccatcaagttgacactcaatattaaccatcacaagtccacccttgccaacttgaacccatacacatcctgagatcatatgtaatcttcaaataaagacaataataaggtcataattatgcctaacataatacaactatccttcatgcaactggaaacacaccaatccccaagccaaatkctattccatagagttaacaatacttaaatactgatatggatatgaagtcaataaatcttatgtcacatgataaaggaaaaaggaaataaaatgaagatattttcttggtacaaatgaagatattttctgtatacctgaacaaacatgtttttagcaaaaggaggaggaaatactcatgacaattacagtccttgtttctgcagttggtcacgtggtcatagctggtattgatgactacactcttctcctacccattctgtattccctttgcctttagcaagcaccttagcaggccgtgggtttttttcctggtggagtgacccaaacctttattcctgaagtgtctgggtcatttgtagtcctgcctggattgggctattgtagtttcccattaaccttaatcagagggcatggtaatactaagagatgccctaatggatctcctgtattccacgcatacccttccttacctccgttgtggagtagtagactggtttcatcttgatagtctgggtcagtcaccccagccaacattgtaactcccttcttagcctgttgacttaaaggtaggaggaaccccaagtgtccaggtagcaaaaattttgctagtgggtcactaggggtgataataagaggtgccacttccacttccacccctgattcctggactctgcatatcctggctatgggaaaagcagtaccgtatattggaagctggctcagagcatacacagccttctggagaactttgccccagccctgcaaagtattgtcacttagttggcattttaattctgacttccaaaggcaattctattatcctttcaatccagatgcttcaggatggccttttgatggcaccactcaccattactcctagtgacccactagcaaaattttgcttcctgttcccacaatattatgttctgctggcctagaagtcttagttscagagggaggaacaccaggagacacaacaatgattcctttgaactggaagttaagattgccacctggacactttgggctcctcctacctttaagtcaacaggctaagaagggggttacagtgctgkctggggtgattgacccagactatcaagacgaaatcagtctactactacacaacagaggtaaggaagggtatgcagggaatataggagattcattagggcatctcttagtattaccatgccctgtgattaaggtcaatgggaaactacagcagcccaatccaggcaggactgcagatggctcagacccttcaggaatgaaggtttgggtcactccakgaaaaaaaccatgacctgctgaggtgcttgctaaaggcaaagggaatacagaatgggtagkagaagaaggtastcatcaataccagctatgaccacgtgaccagttgcagaaatgaggactgtaattgtcatatttcttccttctttgttaaaaacatgtttgtgcatgtacacacttgtactaagaaaatatcttcatttcctttttcctttatcatgtgacataagatttattgacctcatatccatgtcagtatttaagtattgttaactctatggaatagcatttgggttggggattggtgcgtttctagttgtataaaggatagttgtattatattaggtgtaattatgacctcattattgtctttatttgaagattatgtatgatctcaggagacgtgtataggttcaagttgtcaaggggtggacttgtgatagttaatactgagtgtcaacttgattggattgaaggactcaaagtattgatcctgggtgtgtctgtgagggtgttgccaaaggagattaacatttgagtcagtgggctgggaaaggcagacccaccctaatctggataggcaccatctaatcagctgccagcatggccagaatataaagtgggcagaaaagcatgaaaaggttagactggcttagcctcccagcctacatctttctcctttactggatgctccctgcccttgaacgtcggactgcaaattcttcagctttgggactcagactggcttccttgctcctcagcttgcagacagcctattgtgggaccttgtgatcatgtgagttaatactacttaataaactccctagatagataaatagatagatatagatatagatatagatatagatgtatttatcctattagttttgtcactctagagaaccccgactaataagatgcagtatttatttgtcttccctctgtcaaaccttgagccaaccacttttctcagattgcctgagaaggtrtagggaaaagaacatacaagatagatgagacatggaggaaagaactattaatggtggggacagcttctttacatggtgaagaggatgagaaaagccacccttaggccaaagaactccatggcctctaagagggtgctatggtttaaatattttttccctccaaagttgaaacttaatacccagtgtgtcggtattgagaagtagggactttaagaggtgattggctcatgagagatctgtccataggaatagattagtctatccatggattaatgagttaatggattaactggtggcattataagaagaggaagagtgacttgagctarcactttagcatgctcaacttcctcgctatgtgataccatgcactaccttaggactgtagagagtgtccaccagatatggtctcttaactttggactcaagttctccttaaactgtaagaaataaattatttaaaaataaattacccattttcagatgttctaagcagcaaaaaactgacatatatagagtgcaaagccccagaatggcataggagaagacttgttgcttcagacagggttcttggcataatcaatggtgaggctcccaaacacagctgcaattttagccccagagccagctgtcctgactttggaagtcctagccccaatgaacttggctgctatgccaatatcccttraagtggtgctggtttggaagctgtgactagggttaagtgaggtcgggggatgtggggctgccaaactgctgaagctctcrtctgttagtrtctctggttgcttgagaactactgcagagagtggtgggcttagcacctgacaggtgctctcaaacrgagaaaggtgggaacacacttggcacaggtgtacattttcaggggtgaaagactggggcaagggagcttccctagtgcagagaaggttgagagaggcaatgactggcacttttaaaagtagtttttaaagtagttgtgatttagtgtgcatgaccaattgtaaggaaacaaaattgagacaataaaccttttggggaggttgttttagagattcatgtatgagaaatgacagcttagttagtatggcccactgggaatgaaagaaaggtaatagttcaagagaaattctgaagaactatcgccaaggttaaggagctgaggaggtggtatcttccaagggcgaatgcctagtagtttgttgtactatttgagaatataaatagttaagagttacatttaaaactgatgattgaaaagttaaagtttggagaacctttcaagacagaatcaaggacagaggcaagaattaagctttgagtaaaagttctaaagaaacaaaggygaagaaactctagattcaagtaaatattaaaaccattagttactgtcatctgaagaaaatcaagagaaagcaggccagctgctgtggggatggatccacttgaatgaaaccaaaatatcttgttaccatgaagctaaaaatgatacaaactaatactgaaattcatagctgaaagaatcatttccattaggtgttgacttgtttatcgttaatttttttctgaccagaatgtaagctccatgagagtaggtgccatgtctgttttatttgtggttatatgttcagtagttagacaagggattgataaatatttgttgaatgaataaatgaataaacccttgcatactctgaccttaagtgggagataaagtctgcccaagtccaagaacaatgtttgcccaaattgagaacaaaatggaatcctagggcacactgtccagtagcgcatgatgaaaatattctgtatactagccacatatggctatggagcagttgaaatgtggcttgtacatctgaggaactaattgccacatgcagcttgtggctactgtattgggcaatgcagatgtgtataatgacttcaccagttaggaaacctgcctcttctgggcagatgtaacctgtgccagggcagtggctttgccaggggccagaagcagtgtgggacttgggaaggaaataayggattcactgctggggctggttttattaatccttagcccaagggataggagctgtctgccaagcttatgtgagatccaggttacttcaccagggaaagagagcagagaggtgtttgggtccaaagccctagttagcagtaaaaatgagtttactctgaaggtctttgtgaaaatacctgttagagaactagaggctttcatagatgactagaaaaacttcaagatttagggattctggtcacctttctttgtaccacatgaacgataattgcattcgatcattaaaagacggactaggytcatataaatgcttaacaaacactcaagacacccaggaattcacagttgaggaaagcaacgtctttcaatactgtaagtatagcagatactaaaaaatacttctatgtatttagctatgtattaaattagatgaacatttatatttatcatgtgtatctaatttttattagattttgaaatgttatactgtggtttttgttttagcagatttacctggttatagcttgcttaggcaagtattagaattattctgatttccttgagctccctgcagcttggccgggagagaaggagggaattgttcaggagtgtgctaaattggctttgtatttagaattcacccagtgataatacatatcaatatcatgtattgagctgcatgtgggagcagatgtttggcatgtgtcaggctacttctgggaatagtctgtattgaagaaaggaaagtatgcttcagatctttacacataatttatgcaagtgaataaggatttctcacaaaggaagaatgccagacagactattatatttagcaagataaagtgtgctgtgtgcaaattcccaaagtcggccagtatagcagaggacaaagaaatattaataaattcctgttttataggagattagttctctaacgagcaaacaagcaagaaaataggggagtctcttagggttttctgaagattggttcacctcccttaggctaaccatttgttttcattgtctttatgagagaaagtcttttgtaaggatttaatgtgcaccacaggaaaatgtttacatattggaatcttaaggtttggagggactttcaaagatcatctaatcctgccacctatctaacacttgacttggttttgcaaaagtcttaccaagggtcatccaatcagggtttcagcatcttcaggagagagagtgatcagtagctcccaagctgagccattctgtccttagaggactttgacaccaaggtacccttagagagtctaatacatctgtcctacttgtaaccactggggtcaaacacaacacctctaattctttttcccagtgaagttattaggatatttgagcatgctgatcagatctccmgggtaaatatgctcaagtacttygaggaattcttggatattattgatttgattgtttgtacatctcaggtcatgcttgaatgtgctcagtttctccatgcttgtattgcagtacttcatgggttgtccaggctatatagagataagtggggcttttgcttccttttatacagattctcttctccttttcctctccttcctctcctctcctgtcttttcctcccctccgcttccctactctttttctccttccctcctctcccctcctataatacattacatttattcattcactcaaaaatattccatttactgttgattcacattaacctttctgtagactaaaatctctaagtcttagttgcctgtattgctactaygccacatctccattctgtacaaaacaattgtccttttggacttaatcacatcattttacatttacttctatttcttttcaatttatttctattattacttttcatttgtggatacttcatttctataagtactttaaaatttatttttattaatttaagatatagtccttgtctccaacctgtcagcttccaaccccattcagtcatccacatggccactctcccttctacaaattttatgatgtccgctctattttcttccaggacattgagtaacatggtgaaacaaatggaacccagaaaagaattctatgattctgagatttagaactaggttgatgctgatgcactagttaacaccrtttgaatatagctgttgaaactgttactgatctgcctcacagtctgggcactcagctcctgtaatccattttatctacaagattaagttaaaagaccttcttctgttctctttggaggtgatgtgtgctaggttatcttcaatttctgtaatcttaggaattatatcaaagaaggaaagggcatttgatgattcttatttccttctccagatattgtgttgtcctctctttagcatatttcttagacaagcagtaccctttgattctctaacagacacgtaggactgagaggagggtaccagaaacaaaytgaatattcaggtaattactataaattgtgatgcattttatggtagcacaaaacataacaagttgctttgccatatcaaatgaaatccactattttctagtcagcagagaacttgaaataattgatgtttttgttaaaacaaatcagaacctctgaaccatggctaattcttatttctgaaggtttttcttgtattttcaaagaactgaaaatattwaaaatttttagccacatcagtgtcatgaaaattcaggagatttatatacattttggtgaaaatgaggaggcacacgaagaatccctcagtaaaaataaaacccttgcagcaaggtgtatgctaataagtcagttggatacaacagtgatggacagarttgaaaaatttcaaatcagtctttatcttcttatgtggaaaataggtgttgcattcattatgcaactaaatcaaggtaaaatctgtaaaaaaaaaaaaaataatgaaaataaaaccccaaccccctgtcatctctatagtaaaacaggaactagtttcctataaagacatggctgcttccttctcmttcaagtcgacagatactctctatgaccagtgtgactgtttctaagttgtcattattcaggtgactgagttttatattaaattttattccacatgtgcagtcatttaaattatgtagacattttaataaaatcagtgttatccttttggaaacataagaccattttttgttaaatttcatgatactttgtattttcgttttttttgttgttgttgttgttttgagacagagtctcgctctgttgcccaggctggagtgcagtggcgccatctcggttcactgcaagctccgcctcctaggttcaagcgattgtcctgcctcagcctcccgagtagctgggaccacagatgcccaccaccatgctcagctaattttttgtatttttagtagagacgggtttcaccatattagccaggatgatcttaatatcctgatcttgtgatccgcccccttcggcctcccaaagtgctgggattataggcgtgagccactgcgcccggccaatactttgtatgttccattctccaattggaagcataaaaatttaagaacatcgtagttttaaaaagagtattatgataaagctttaatttctgattttagaaaggaattcaatatggaccaggaccagaagaggtwtctaaggtttgaaaatatattttttgaagtatagatttcattgatagtttatgtgtgtgtttccagtatagtgagaaaatgagaaagtcatccatatccatgtgtttttcaacttcattatcactacaatttgtaactatttggaccttgaagaaatgtccttggcagtccctgatttcatgtttgtttgtccatctgggttgagccctggttagaaaattaataataattaaattaatattaacataagtaataataaagagaggactgggtggtcatgaggtaggcaggagttaaaatgaaattttcttagttgaaagtttgtaaaaacagctatgtattatctcaacacttcattagagatttacattcttagaatttttagaagctgaaataagtattttattttcttgttataattaactcatgtgcatggagactaccggagataattattgaagttattagaaattctgagctcccaaataaaactgtcataagatcttgtcctgttctgtgatggcttacagaattaatgcatttcctatgggcaggagtgttagcataaagttgagggtaggcscatgccttccccaccttcatccaagattcccagagtgaaggcaaatgggagtggccataaacttgataagacaaacagattatacaaaatctactttctttgttttgaaacaaattacaaactgcaatttaaaactcaagacggaaaatagaagcctactagggccacgtcctggtaacatatgtgaccttcatcatcctcccttctccctgaaatgtaaatcatrttttgtctccctaaataatcctcaaatctcaagattggaattcatgtttaagaagaaaaacctatcttggtctaacagcttgacaccttccttctaactgtgctatactctcctttgatctgattgactgatgtgttctggtcatgaacatgaccagttcatgygggtaagtrctattcagtgggagaagtcttcttctaagtttagaggktgggtgctcttacaccaagaggaaatattttttgtttcataaacagtctatggaattaggtggttgattatgatattgggttatattcttgttctaagaatggggattccaacctatgagccctctcagctttgaggcatctgaactttgagtcccacttgcagctgtcacattgactaagttagtggtttttttttttttttttttttttttttttgagacaagagtctcgctctgtcacccaggctggagcgcagtggcgcgattttggctcactgcaagctccgcctcccgagttcacgacattctcctgcctcagcctcctgagaagctgggactacaggtgcctrmcaccatgactggccaattttttaaaatatttttagtagagacaggatttcaccgtgttagccaggatggtctcaatctcctgacctcgtgatctgcccatctagcctcccaaagtgctgggattaattataggtgtgagccactgtggccagccaagttagtggtttttaatcagaattgcacatcacaataacctgggaagcaagcccacacttatatctccagctaccttatttcatcagttccagtatgtactttttyccccrtattttctcatttttgaaatctggatgtgctttacattagtttgatcaaacttttttaagataaattttrttgtgcatatgtgaggcttacaacgtgatgttatgggatacatgtagacagtaaggtgtttactatagtgaagcaaactaacatatctatcatctcatggagttacttttttgatgacaaaagcaggcaactaaatctacttatttaacgcaaatgcccaatacaatacaattttattaactacaggttgtgtatcttttatccaaaatacttgaggccagaagtgtttcagatttgggcctttttctgtattttggaatatttacacatacatagtgagatatctgggggatgggatccaagcctaaacacaaaatttatgttttattacaccgtatacatatagcctaaaagtaatttttattcaatatcttaaataattttgttcatgaaacaaagtttgtgtatgttgaatgatcagaaggcagtgttgccactatctcaggtacctgtgtagcatcatgtctgtgctcagaaagttccagattttggagcattttggattttagatctttggattagggatactcaacctacataatcctcatgttgttcattatatttctggacctgtgcatcctagttaactgctactctstctgtatagttgacgttttttatttagactccacatataagagagattatgcagtatttttctatgtttcatttatttcactgagaataatcatgggttaatttctgccttatctttcttagtgatacataaaataatggtgtatcttatgatcaatggcatcttagaatcaatgaaatattgattgcatcaacatctctgagggggatggtgtctcactgtgtgaattttacaaaagccctacagttgagtctgatgcacaccattggttataaatatgttgacctagatcttggcatatttttaaaattaacaacaataataaacttatcactgacattcattggtttctctcttgccaggacctgggctaagcactttctatacttttaatcttatttaattatcccaaccaacctattggatagatgttattatccctactatatggattaagatacaggcttggagacatgaagtaacctgtccaaggacatgtatgtattagtagaagagcaagtacatgagcccaggtgggtttcactccaaagctctaaccactattttatacagcaaagcaatggtttgtaaagtgtggtctgcagaccagcagcatcagcatcctctggggatgtgttagaaatgcaaattttggggccctactgcagacctaaggtatgagaaactctgagagtggggcccagtaatgtgtttttacaagcttttccaggtgtttctggtgcatcctaaactattagamctattaagaccactgttgtacagcatacaatgctcctgcaataggaatacaagacatagctaataaagataggacctaataaagtttattggatagctgtctggctcatattgtaatcttaagataatgccatatttgcaaggttgactaagcttttagttgcttaataacaaataaaattgcatttgctcaaatgtgctttaattatagttcccagtaggcagaactatggtaactaaatatactaggctctaatggtttttgcataatgagcatagtcaaagcacttagcatgaatggattacaattccccatactagttgggagagctttagaaggaccacatgcttttctttggtttgacatcctcttgtcctcaatcttagtctaatcctattatttcttttcttttaaagcacaaaatacggcatctttgttcctaagaggaaaggatgaactgacaatatccttccttgtattatcctggtttgatagattgsttaaatctagcatttgtaatgcagatagaaataaacagtttctgaacaaaagctgattaaagaatttagttgaaaaaataaagaacctgcttgcttagttaaaaaaaaaaggtgattgacattaaggaattaagcatccccaaaggataactaaatttgattccgagaagagaaaaggcagtgtaaaaaataatataccaaagtgacagtgtagagatgcctggtgaatatgattgtgtctactcaacatcagtacaactatttgaaaagcacaacattcaaatagtaatttttttgctctgcatgatgcaaaataagcaattygatttttcttttttcaccaaattgactggttcttgaatgtgttatttgacccacagtactgtattatccacagcatttcccagatgactgaactaagtagatgtcttattgttgttttttcctaatagacatgtatggggatgaagatagtggtaattggaaaaggggaaagcatagcatttggaacttggaagtgsaaattttagaagcatgagcactactcagcctagggacctgttattcggctacagtgacctgcagaccctgtctctacctccacrgaattgtgcacacttattagtgcagattggtgtcttataaatacggcaaagggattgaaggccttgttgcagatcttgaaatgctttctttgtgatacctgtttctgatgtgtggcttgaatttcaaaatgttacctgatttatacccaaaagctatttcctcctgggtctttctgccttgaataaatctttggacttttgccttatacacccggatcttattgctgcctgtgctcctgttgctatttggtctctatactgggagtccaaaccacctgtccaaactcaaaacctgccgacaacctccattttaactaatctcttataaatggatattagttctcctyatggactcatagccctcctagaagattcagctaagttccttgatgaaggtggctaccattgtagtgtaatagttaagtgcattcataagactgacctttaattgaagcccctatcaacaattcagtgattgtgaaatctggagtaactttctgggcttcagtttccttatctactttatattcagtgagatgtatatgaatatatttgaatgagtgaaacactgacgaacataaaataggatatgtttaaggcagttagcaaagcctaatgcaaggatagagttcaacatgtttttaccattgttattattatttccctcctattctttggttatttgtttttaacattgttaccacccagtccctgtatatataaactggyctggatctctaaaaattgtgtgtttatgatgtacaacatgatgtttatatgtacaggctcacctcactttattgtactttacagatagtgttttttttttttttttttttttttacaaattgaaattttgtggcaaccctacattgagcaagtctattggtgacatttttccaacagcgtgtgttcacttagtatctctgtgtcacattttggtaattttcccgatatttcaaattatttttactattattatatctgttatggtgatctttgatgttactattgtgattgtttagacagtgaacttgatkgaaaaatgttatatattttcttactgctacactgaccaggcattccctcatctctgtccctctctttggacctccctatgccctgagacacaacaatattggaattaggtcaattaataaccctacagtggtccctatgttatcaagtggaaggaagattcatacctctgtctttcaattaaaagctagaaatgatgaagcttggtgaggaaagcaggtcgaaagctgagacagactgaaagctaagcctcttatgccaaacagccaaattgtgaatgcaactggaaagttcttgaagggaattgaaaatgctactccagtgaacacatgaatgatragaaagcaaaacagccttactgctgatatagagaaagtttttgtggtttggatagaagatcaaaccagccacaacattcccataagccaaaacctaatccagagcaaggccctgactctcctcaattttataaaggaagggagagaggygaagaagctgcagaaaaagaatctgaggtttcaggaaagaagctgtttccataaccagaaatgccaggtaaagcagaaggtgctaatgtagaagctgaagcaacttatctaggagatttagtgaagagcattgatgaaggtggctatgttaaacaagaggttttcaatgtagacaaagcagccttctattggaagatgttgtctaggactttgatagctagggaggagaagtcaatgctggcttcacaggacaggctgaccctcctgttaggtgctagtgcagctgatgactttaagtggaagccaatgctcatttaccatcttgaaaaccctagggcccttaagaagtatgttaaatctactctgcttatgccctataattagaataaaacttggattacagtacatgtctttatagcatggtttaatgaatattttrtgctcactcttaagacctgctgctcagaaaaaaaaaagattcctttcaagatagtactgctcattgagaacacacctagtcttccaagggctcagatggacatacacaaggaaattaatgtttttatgacaactaacacaacatccattctgcagcccatggatcaaggagtaacttaacctctcaagtctcattatttaggaaatacatttttttaaggttataggtttcctagatrgygatacctgtatgtatccgggcaaagtaaatgaagactcctggaaaaaattcatcattctaaatgccagtaagaacatttgtgattcatgggaggaggtaaaaatakcaacattaacaggaagtttggaagaagttgatgccaacccttagggatggctttgaggggttcaagactgtagtagaggaaataactgcagatgtggtggaaataagaagagaactagaattagaagtggaatttgatgatgtgactgaattgcttcaatctcataaaacttgaatggatgaagagttatttcttatggatgagcaaagaaagtaatttcttgaggtggaatctactcctggtgaagatgctgtgaacattgttgaaataacaaaggatttagaatattacataaacttagttgatgaagcagtggcagggtctgaaaggagtgattccaattttgaaagaacttttactgtgggtaaaatgctgtaacagcatcacatgctaccaagaaatttcttgtgaaaggaagagtcagtcaatgaagtaagytttattgttgttttattttacaaaattgccacagccactccatttatcagcaaccaccaccctgatcagtcagcagccatcaacattggggcaagaccctccaccagcaaaaatattatgcttttctgaaggttcagatgattctttgcatttttagcaataaaatattttaragttaatgtgtgtacattttttgatacagtgctgttgcatactcagtggaatacaatatagcctaaacattacttttatatgcactaggaaataaaaaagttcacatgactcactttattgcaatattcacttaattgcagtggtctgaaatagaacctgtgacatctctgagctatgcctgtatacattgtggggtgactaaatcaagctatttaacatatgcattcccttatacacttaacagtttccctgttggctagtctaggctacttccatcccacaaccatccatatcctgccatttataagaccaatrcaaattagtatgaatcaaataatttctttagagagtttattattatctgctaaagcttatcagcattgagcctttgaatcaaatggtttccttaatcttatgcaataagaaaaagctttttaggagtgtttctcctaaaattttgtgatgatttttatggaagaaactgtatcaaaatacaaatgtttaattccgtggttctgacttcctaagttgagtaaatagcagaactcaggtaatactaaagcttaaccatttaatgcttaggattgcttccttgttaattagggtaactttatagacataatcattggtttggtttcaaacttggctgttgcttggccttacagcagcagtcaactaatctaagcaatttaccattcttataacaaggatgcagaggaagaggcaaaagtacttaagtgggtttggaaatcattgcagttaagacttgatggagtcagatgattagataatgactggcatagaaatattttattgaccatgatttaatagcttcacaattttcttttcattttaagagcatttacatacttctgagttgtttaatagataaatctcagacartggcattataacatgatggtgatacaatgataaactcatatattacatctaatggatatcaaagtgatagtttctccaaaaccaacagataagacattttcataagctgaaatcataaaatgcatttacatctgcatatgtatcrtgtacatttataggtgcacatttaactctgcatgaatatttatgtagtcacacatatgaattgggatttattattagtgctcaatatggaattgtaaagtcatggaggcttaaggcagtttcctcaaaacctacttttgcttcattatgayttactggtttaaacttaaccagttgtatattaatagtactgttctgtttgaagcgaggactattcttttcaaagcttattaggactgtatatgaattttggacctatttaagatttgatgaattggattaaagaaataacatctgaaaccttgtaagtttctaatcatgaaggctgctttctgttttatgtgattgaacattttaaaatgtttttgaagaagcatttgcatttgggggcaaatggaagagacgatttcctaatgaaagtcaaaaatgaagaagcaaggtccatgtaatgcatctgagagtgctgtactttttttttttctcaagggatgtagatttaagaggttttcacataatccaagcttgtgaggcatttattcttgcacagattactgttatccattgaactttacagaaataaagtgtgggttattttcyctttgaaaaatgtgtgtgaatatgtagctttgatgatgtgagtcataggaggaagtcttaataaccagtggtgtctctgaattgacatgaacaaagtaaaaagtggaagaatttcatcttccattgctgttaaatggatttggaatttgtttaagtcaagtttataagtgtattcaaatctttcctggtctaaccatgtatttgatcaaatccaataatcttgatacatgatatataaagggagaaaggtgtacacacacacamaaacacacacacagagtaaacaaggcagtgccaacaactaccagaaacccatctgtcacccatgatcctaatataggttatgttatggcctaggcattctatctctcaggatgaataaatctaacaatagatgcaaagttcttatctttttctgtcctggggagatcagagaaggtggggttgggcctaaaggggacattacaatattgtattacaaagctagcagccccagtttttgaacaatgggtgcttcaccttccctctctaccgctgttcctgccccatgacttttgtccatcagagcagaccagaatcacaattcaggtccatcactatcctttccaaatacaattctgtttttaattgactcatttttttctgaacatctaggagcgagttgagtagcaaattatttctgttggcccagttgttttgtttcattgagaagatgagtttagtaaataaaaagttttctggctgggccagttaaagaccagtataacagtatctttaattattttgctattagaataaaacatgtctactccctaaatctaagtatagaaatcattatacatatatcactttatatatatttctctctttctctctttcatgggaaggtcatcataatattattctgtatgaaaatttccagcatgcaagctgatgcctactattgttttcctttccttttaargtgaaataattgcaaacaacttkaggaaatctctggccaggcgcagtggctcatgactgtaatcccagcactttgggaggctgaggcaggcggatcacttgaacttatgagttctagaccagcctggacaacatagtgaggccccatctctactaaaaatacaaaaattarctgggtgtggtggtacatgcctgtagtcccagctacttgtggggctgaggtgggaggatggcttgaacccaggaggcagaagttgcagtgaaccaagatcatgccactgcaytccagcctgggagatagagccagactttgcctcaaaacaaaaaaaagaacagcaacraaagaaatctctgtacctcctcctatacccataaatcatttcttatattcttatggagatatattttggctctcttttggttttagagagtgctatttcttctgtttttatataatttgaatgatattttttgaatacttcctatggccacacattgtgctagggactggagacaggaagatgaaaagacatggactggcctttaggtagctcacagtctggcaagaaaaaaaaaatcactcaattttctgcttatttatttatatgcataagtgtaatgagaagctaattacacttacttatgtgtaattactaatgtccacagtgtgccaagtgactcagagtgtggggtcagtggggatgccagtggtcagggaaggcttcatagaggaggagtatactgaactttactgaatttttttgagaaaataaggraataaagatatattagggaaaaaacccttatggtagagagggtgtaggaactccagtcaataatagtttcataattattacatattaaagtgatatttcaggtatcttgggtcaaataaaataactttattatactaaaaatttaaataataatgaaaacttttaacctttttaaaaactttttaaaatgtgactactaggaaatataaagttacatacatgacttgtatcagattgctattgcagaacactagtctagatatatttttaatggaggggacagtgtttaacaaaataattgcttaataaatactttctgacmaattaattgatagtgtctatgttttctataatatttggtacaaatgtttcctctttcttttttttaaaatttaagttctggggtacatgtgcagaatgtgcaggtttgttacataagtatattcgtgtcatggtggtttgctgtacccatcaacctgtcatctaaattaggtatttctcctaatgctatccctcctctgaccccccaaccgcctgacaggacctggtatgtgatattcccccaccctgtgtccatgtgttctcattgttctactcccatttatgagtgagaacatgtggtgtttggttttctgttcttgtgttagtttgctgagaatgatggtttccagctttatccatgtccctgcaaaagacatgaactcatcctttttatggctacatagtattccatggtgtatatgtgccacattttcttaatccartttatcattgatgggcatttgggttggttccaagtctttgctattgggaatagtgccacattaaacacatgtgtgcatgtgtgtttacagtagaatgatttataatcgtttgggtatatacccagtaatggaattgctgggtcaaatgatatttctggttctagatccttgaggaattgccacactgtcttccacaatggttgaactaatttaccctaccaccaacagggtaaaagcattcctatttctccacatcttttccagcatctgttgtttcctgactttttaatgattgccattctaactagtgtgagatggtatctcattgtggttttgatttgcatttctctaatgaccagtgatgatgagctttttttcatatgtttgttggctgcataaatgtcttcttttgagaagtgtctgttcatatcctttgcccactttttgaaggggttgcttgttttcttgtaaatttgtttaagttctttgtagattctggatattagccctttgttagatgagtagattgcaaaaattttttcccattctgtaggctgcctgttcactctgatgatagtttcttytgctgtgcagaagctctttaattagatctcatttgtcaattttggcttttgttgccattgcttttggtgttttagtcatgaagtctttgcccatgcctatgtcctcaatggtattgcctaggttttcttctagagtttttatggttttaggtcttacatttaatccatcttgagttaatttttgtataaggtgtaatgaaggggtccagtttcagttttctgcatatggctagccagttttcccagcaccatttattaaatagggaattctttccccatttcttgtttttgtcacgtttgtcaaagacctgatggtcgtagatgtttggtgttatttctgaggcctctgtactgttccattggtctatatatctgttttagtactagtactatgttgttttggttcctgtatccttgtagtatagtttgaagtcaggcagtgtgatgcctccagctttgttctttttgctttggattgtcttggctatgtgggctcttttttggttccatatgaaattaacagtagttttctccagttccgtgaagaaagtcaatgatagctyaatgggtatagcattgaatctataaattactttgggcagtatggccattttcatgatattgattcttcctatccatgagcatggaatgtctttccatttatttgtgtcctctcttatttccttgagcattggtttttctccttgaagaggtccttcatatcccttgtaagttgtatttctaggtattttattttctttgtagcaattgtgaatgggagttcactcatgatttggctctctgtatgttactggtatataggaatgcttgtgacttttgcacattgattttgtatcctgagactgctgaagctgcttatcagcttaaggagatttcgagctgagacgaaggggttttctaaatatataatcatgtcatctctttctagttatgtatatttaaaataattcagattcaattgatagttattgattgcatgtgttggggaaattactgggctaagaaaagaaataatgttcattatggaaacagaaataaactgatgattgtatggtatcagatatgcaaaaatgaaatagaatatgcaattggaaatgaatagtcacttgaatctggccaaaataaagagaaattgataatatagagagccttatttttgtcattatggtctcacgataaggcaagtaaaatatttttttctaaactagagtctatcctgtcttgaaaaacaaacaaacaaaactcagtgagttatttggtttgcatgcagaatagttgaataaattcattgatgtaaacacaggtaatgtatatgtatatttacaaagttggacagagacatataggaagagaagttagggtcaaagatctctaagttttcattagtggagaggtgactacagaattgaagactttagagaacataaccgtcttgagtactaagcacaaaacttagtttctgcgggtaagtgcacgggaacaatctgacctatagggcaaaccactggccagagcaaatatgtgggttgtggtagtaaaacatttactgcgggcttagctgatcatgttatcatggtgggcaacatttgctctagctgtaggtattcaaagaaaacaatgttaagtgttttgagcaagctcttattgaagaggattggttaaaattggaaattgctaactgagctattaaaaggcacagtatctataaatcaattaaggtgcattatattctactccattgccagtattcatttaaacataaacttctgtgtgttctactcacagtaatacaaatcaaatgtttaagctactttaactaattttatagtgtttgttttttgttgaaatatattgaaataattttctggtaagcttgaagggaaacaaatttgtattcaacaaattcctggtgctataatcttatttttgctttgcttttcacatcttgaccatatgcagcagcatgggggcattgtaaaaagctgggctttggcatttgaacatacctggtctgaatagtgtctctactactgattgtttgactttggccaagtcacttaatctatccaagcctcaatttgcttgrccctaatacctacccttacagggatgttaagggagaaaatataaaatgtattgcttagcacataattgttgttttattttttttacaaggttgaaaagcattctgagcaggacagttagttttgtataatagaaaatgtaattaaaatgaacattgtatatatgaacaatattatttttctggtcccagggtttggaaggaggagagaaagagtgtagggaagaaggttaggagaggggagaagggagcccatggcaacagcaaagaaagctgcttcatttctagttggagccattggagggatcaagtctcctctatgctggatacagagaaatacttagaaccagtacagttgagagaggaggaacagcagtactgggtgattctcctttaactggagaacaggcctcagctttgcctgactatcagatgtccaatcaaaaaatgtgtgaagaaataagcacttctctctctcctcccacgaggcttgtgatgrgcacaagtgctttccttcaggctcctgggcctctactcatatgctgccggagagatagtatgaaaacagaacatgtacaaarcatccgttcttgggatctgctgtgtctgagagcacctgctctgtggtgaggcaggagtagagccagcagcaggccacttaagcagagtgtggcacatagtaggatcccatggtgctgacaggactagaakgaacgcacacatcccatagtttacaggccccatgagtatcwgtagcataaacaattcaagctttattctagacaaatgagactcttgttatattcacttacacacggtgatggtataagagaagaaaagagaatggaaatcaatgataaattaagcaaagggtattaacttccaaaagacaagccctttaaatgcctctcaaaattctgcatttgcttgttttacaaaaccctttgatcaatgaaatgcagtaggtgaggagtttcacacttagcaattctttctccaaagcctatttaggatgaaccagaaaatctttcacttttttttcccaagcttaacctttttacatagagaaaggatttctgttatcttcatttaaagtaagacttagataactaagatcaattgagttttgagagctatacactttgtcctttagctatgataatatggtcagaactgtctttatgaaaatgaagaaggagaattgtttgatgtatgaatattttcaagagcagaactgactccagttctgggcatcacatttgtttatatgtcagtcatccataatgataaaggagaggtgtctcctgaaggtgggaatgttctttgctgaattttaagtattgctaaaccatttagcaaggggatttgagatcccactcaattcatatagaaagtgggaatagcaagaaaagaacaatattaaatggcactgctttcaaaacaggaatagcctggattttaaaaacttaactgcttcaaaatgacatagtccaataccatttgcatatttgaattsaaatcttttttacatgtatctggggaaatagcatccaaaaatagtttttctgggtctagaacaaagccaaatctaggtattagtctaaggctacaaaattattttcttatgtctgcccaaaataaagatgattgcctctccttctcccctgataggatctcctttgaacatattactttatacaataagttttattcaattctaaaccaacattctaagaatagtatagtcttygggccataatgttagtttattgtttgttcattcttgttgaaacaaaacattgtctaccttttgataatgaaaactatttttctgttttctgcatagtttcaaaacccaagtcatctgaattgtgttttttagagggagtatttttttcccctggattttcgaagaagcctgaataaaacagtattgcattagtaaattggttttcatttgtacagacttatgctaattgtgactttacctgagtctgttttgatgacaaagatgatatatatttgcaggagatttcttttttttccctcaccactagttgccagaatcttgtcagagtagaaaaattggaagattgattagtgtcgttttctttttcattgatttacctgggtttctggctggctgatgaatgtgtrgcatcaggtgctatggattatgtgtgtgtgaagaaaaaataaagagctcaataacaaaaataataaattctaccctttctaatgcttacagtttgataggcattgtaataattacttcatacacattatctcttttaatctttgcaacaactggctcttacagatgaggaagctgagtttagagaggataattaatttattcagtgccatgcagctaacaagtgatgaaactggttttgccttaggtttatctgacttcagaacccaggccagatggcttctgatcaaattatgacttaggatcaaattaaattcaagatatctgagcctactgctttactaggaatcatgggggatgcaaagaccacaaggaatttagggtcctttaaaggaaaaaataaatgtgtgcaaataattaagtaataattggtaagcaaatttttgcaggtgagttttagatttttttcccttgaaggtagccctttttgcttgaaatctctgcacctgtcaaccccagaaagtatacattttccttgcaaaagctgagtcccatttccattgttcaagctaaatatgatgaatatataaatttccatgacttctaaaccctgtacagtgttattatctctcaaataagcaatcaaaaatagtctttaaatcatctcctttattcctcaagttcactgctgccaaattttgcttctaaacactcctctatccctctctkctasttctctaatgtggctttagctcggggacttccatgtctggtttggtcaattgtagttttytttctgtagtattgtagcattgggcactactctctgcagactgtccttattgcctcttattattgtggtgtttttctttcaattataggttctaccaagtcagtcyttaaaatttttgtggattcacaagaccctgtgtattacagctaatagtcttcactctctgcttcaaagtctttttcccagggttactctgttaaagctcattggcctcatctccttttatcttccagatttctccttccttctacccaggttaaattttttccatgtttctgaagcttgttagagagtcaacaaaatgaaatatgagtttaagtatatcctytgtgatggttacaacccctcacagttttgataacattgggcagctttactgaatgtacttatatatgaaataaactgggtagagtgttgattatttggtatatctgcacatgagattgagagcggggaagaagtagagaaaacccttaatataataatagatttggatcttttccctwtagattattctttaagggaatgtcacaggatccttggggtgtcactttgccagccggaagcctcagtggtgggtggtgccttctgcctgagtattacttgctcccacagggcctgttatgcccacttgtcctgataggctgagctcggcccacgctaccagtctggatcccacacctgctaagggcgggccgggcgaggagtggcagggggtgtgtgaacaagcgagcgttggatccagccactgcgcacagccaggcgcgctggctgccgcagtggggcaggcagctccaggcgccagctctgtgcaaggctgcggctggaccagacataccgcaagcggcttctgctgtgggcactggtatttgggcaagtggaacgtggtggcacttgaaagcttggagacactaggaactgcagagcccctggctcagggagcccctaggtctgggctccccgaagggctgcagctcttctcaccgcctgcaatgtggtgagtggggggcgtttttcagccctgtctgtggtacagctctttcagtcccaccattcggtgggtcctgagttcttgtcccacatccaggaagaatgaagtatgtggactactggaggatgagcaaggcagagaggagcttcattgagcaacaaagcagctctcaggagggtagctcctttctgcaggcaggtcacctcaacaagttgaggagacccctgagacccgagacaccaagtaggtggctccttcctgcagttggtaatcccaatgtctgtctaagactggctgagtccaggagtttttatgggcacagaagggaggaagtgtgtgctggttggtccatgggtggccatggatgggcccagaaaaaggacctaagttgtcacttctggctgcggactccacctggaatgggcagccctgcccccgggcttcaggscatccctggcttgtaagtgggcgaggatccacccctttctgctctcagcctgtctgcttcctgcctctgttcgtggtacccaggctattcatgccgaggggtgcctgcaggcccacactgagccaccgccatcccccagcctccctcctatgcttgttggtgcccaaagtccagagggggctgaggcagcaggggcctggcatgtcagtgctgctttcagtgcacgcatacccagctgagttgcaacagtgcctgggctcagctgcaactttactctgcactcgagccggtgctgggagcagagagaggccagggatcaggagcaggcacttctgagcctgcgggggtcgtggggtactcccatgcccctgagagagcagggatgcccagtctggagctgcagctgggtggctgcagctgcgcccagaagcatgggactccaactcggtaggggatggggctcccacctattcctgcggagccttccccactcagctggtgtccctgccacagctgctccagacaggctgctgctgccatcaggaagagacctcakkgttatgtaattgttgggggaaagtggaagagacttttatattaaaggtttttgacttttttttcagttaccatgctttagtgcttattaattttttttttaactctstgattgagatcttccttaccttccaggcacaagctccctctacatcaatgtagtagatacattgcagcatctatgtctgtaccagtgtagtagtctaactttatyaggctccagaatcagctgtggaactttaaaaaagtgttcacaccgtggtcctgtccctgggcttctgatttgttayctagagttgaaaaacattcatgtactcattagaaggtctttcattgcgtagattatttttctttttctacatctgtgtttataactaattcayggtaatagtcggctctgtattgagtgaaatgttccattatcagaagaaaagataaattttgtaagttgaaagaataaagtttgcttctcatgtgttctatgctgaattctgacaagattcatgtcttctcatcacaagctattgatctcttcctattttgtgcttattgtttttccctgttcatgttcctgtcaggttaataatgaaagtattagaaaataataaagaagtcaagttgtagcctcttcagttctctcttcattttaagggggagaggggagggatagcattaggagatatatctaatgttaaatgacgagttaatgggtgcagcacaccaacatggcacatgtatatatatgtaacaaacctgcacgttgtgcacatgtaccctaaaayttaaagtataataaaaaaaagggaatgttgaaaaagagcaaattgaaacttagcatttattgaatacctactgtcagacactattcttattcataatgctgtgtgtaatcaaacaaaactggtgagataggcttggttatttgtctttttccaatgaaactgaggctcagagaaataatataatagtaagtgatatagtggatccttgtaattccacaatacatgatctttttttctcatcattgcctctttggacaccttcaaacattaaaggtggtcatatatgcatgtttcttctcctttttcttaaaactgacagtatcccaattttagagtgataaacatagattaaaatattttacatatacatttttgttcccaaagctttaaagtgctgtttatattttaggtagttgataatataccaaaattggtccctctctgttggacacgtcaaattcgtgctttctgttggacacatcacatatacatgtgcaaagggtgccatttaatttactcactcttgaacttgaccatccaagttcttttttaaaaaaacatttaaaatgggaatatcatctctagaaaagaagtcctataatcactaggaaaatcccccatagcaaacatcagtgtgtactcattaagttgacaaagttgtcaggctctcttattaaggaaataaaaaaactcctatcgagatccacatattctttaaacactatacaattaagcagcactgtaatgcagaaaaaaatcattaaaatgttagaatctggagtttatctgattgagtaggggaaaagacccattgggatttgttaacaggaagatagatttgaattgacaggaataattaatctcttgaggccagataaagaaaaggaacccatttgagcctatggaacaccctcaaatacctataaatactagctataaagacaataaatcatttatgttgacccttgctcctgcaaaagagagaatagtttttgcaaactgctggcgtaactggtgacttggagtcccttttatttatttatttatttaacttcctagtcagcagaaagaatgagttgatagcgattcaaacaatttttattgagaacttttctgcagttctagtttttgcatccagccaagaggaaaatgttattttacagcctttgtattggtgttgatgggttcttagctgacttcttgaagaaaygaaggtgggagaggtagataggacacttctaagagaagagcttaaacattggctgttatccaggcatgggtaatcttgcctctagacagaaatattttactagaggtcactgtcattccttttttaaaaaaggctagtaataaatgtgttcttaatttacatatacaccttttcctcatttttgtttgggcttatcttagttgtttcactcttattcttttgccttttattctgaattgaaatgaaaaatgaaatgtgtaaaacactgcaagaaaattctgcaagctctcctcmttctgaagcctgacagtaattattatttggggattacaggaaaatcttacagtgtaatttagagattcttaatttattcacagactcttcttctttctctaccttgcttagcaaagatactgtctttccgataaaatctaaactttgtttattaacctgtttcctctttcaacaaatatttttaatgcaaacagtaatactgmagtaattacaataaaagcaagcatgtattgaatacatagtatattccaggtactgtatagattatttgatttactcttcacaaccactctatgagaaagttattgttattattatctcagttgacagatgaggacatgtacagtaaggacattaaattgcttcagtagcacagttagaaagtaatgaatctatataaaagtccaggtctggaaattaaattgtagcattagtcacctatttctcataagggggaagggaaatacmaattaaaatacaggttagatttgaatttcagataacaaataatttttagtataagtatgtcccaaatatcgcctgggacatggacaccctatattgctatttgctagacttagcaaccctaggaacacattggattatttgcagagtccattttgagccagaagttatttccagggcatgtagccctactgtcttaggattcaggggaaaggcttaagggtcttcagattttcatgtccccgtgactggcaataaagtgagatttatgaccttgccatgctgcctttttaactcctcagcagtttttcacttgacttccaaggaagtttgcctttgatatttctaagggtgtgtgtctcctacctgttttctgaattgttatctggaaagtacatcttagcaaacagtttaccaataacaacatgaagagaagtagaggcagggaagaagaaagcaacaaggaaaagttcctggctgctctgtgtgccagcgttgtgcaacattctttccatatggcatctcgtttggtagaaacaagaggcatgagtatataatagtgtatattaaatatcttctagtcctagttaggtttctcttagaccttggccagggggttcaatttgaatgactactggtgttgtcagtaaatgaataagtagaaatgcatattataaagtagtcatccatttagcagatagtaaattaaaatgttgtataatccactggagttcaatattgggtcattttcttcaaagaagagagaggtattaattagtttgttgcttggaggcttcattccctttgctgttgtaacaaayggttcctgggcactctcaggccctgactgattaacttgcatagcttccttttgatagctctccttctgacacacatggttaaacaggagagaatgaggtggaggagtagaaaaagaagaagaagaaaaaaaaacttggctcttttcttgataagtgaaagcaaataaatgcaacacatcagcaaacaaaagtgaaatacactgcccaagtcgtccatcttagcaatagagtttctttaagccaaaaatcaaatgtagtggcggtatttcactgttggagttgcaaacaactgagaaatgacaaaagctttttaaggccacggtctttgcaagagggaaagatgtctttctgttgaaactgaaaaattaagatcgattatagctgaggaataaaacctcagtgtgttgaattcaagggacagaattgttgatatagattcttaagtcatcataagtatccaaaagtggaaacttaacaaagtgtggtttccccggtataattttcacatcagtggtttttttctcccccaacctggtctttctcttcaaaggagatttacttttccaaaaagcatttttaattatgttgaagtaaaggcaataccttttcttttaactttaaatttcaaactacttttaaagaaaagttgcaaaaatggaacggagaattttcacatatccctgccctagcctccctcagtattaaaatcttaactggagtgcaatkatcagaacccagaaattaacattgatataataccaataattaaacaaaaatcttattcaaattctaccagttttttcatcaatatttcattgttattattctccaggattctgttcaggatcccatgtcacattttgttgttatttctccttagtctcctgaaatctgtaacagtttctcatctttccttaacttttaagaccttatatttttgaagagtatagaatacttattttgccaaattcccctcaatttgggcttgtctggtgttttctcatgcttggtttgaggttatgtgtttttggcaagaattccacagaaatgatgtgttcttctcagcacatcatgtcatgggatttgtgatgccaatattttttattagtggtggtgttgatcatgaccacttgattaaggtggtttctgctgggttctccactttatagttagtatcttttctcctamtgttaagaaagatcttgggggacatgctttaagactgtgcaaatcctgtttctctttagactgtgaacaaatgatttcagcatacatccatggattttgattctagttacaattgttattatggtgtttgcttaatggtgattttccacttccttctttctttcaacatgtattaattgggattctacagccatggaagagctgtctttctctcctatttagataatagattatttatatccatgtgtatgaacttatatatatttatttggttttatgggtcatattctaatattattatttaacttgtttaatttgttccagctttggctgttaggagcttattttcatttagtgtttgtgctctcttattaagcccttatttatttttttgaacactttcttacttttttgcttcacactatattctaagcttatttttttcctcctgctctagtcctgaaatcaatcacttgtccaagcttttttctttctttctttctttctttcttttttttaaatcagagaatggtgtttagaaactgagatcttcatgctagatgtgcttattactactgggatgtcattgctctaagccttctcagcaggcagagccaggaaatatatgcatatgaataacctgcacatatacacacctctatatttctttatctatatgtctatatagatatttaaagccatttgtactatacaatttatactaaatactgtaaactcagggttcacttttagctttttcctgtctttatttgtaatttatttctcaaatagtgagaaatctgcttattttccatgatatgtttacttctttgtttgattctagtgaacacatagttttagaattgctatcctatgcccctgcgagaaacatatttactgactaaattctagcatttatgcatttrtatttgtctttagcttcatggtatccagtcaagatactgttttctgtagttatttaggttagtgttactattccccatcctttcagtgtagttttgtaactcatttgtaacaggcttatttgttatttttgtattgcattttggatcctcatcattgttagttttagttgttgattgcttaggggcatgtgaaaaatatgaatcataactgtggttctaagagccagagctttmcaaaatgatgcacccaaggcagtatctgtcactccatcctgtcttgatacacataaccatttccgtcttctttccagctctttgacacctgccctctgtagatagtttctttagtttctggtgagttccttccatattttctttgtacaaatgggcagttatgtrtrtgttttcttataatcacttttcttatacaaggagtaacataatatagatactcttttgcacttagctttttttaccttaacagtacatcctggaagttagcctgtaacaattcaaagagatcttcattaatcttttttacagcattattgtactccatttkggagatatatgacaatatcttctttatgtaccactttcccttgcagataggtgtgccacgttaacagactaaggaagtttaatattattataaaagaagcaagaataagacagttaaaaaaaaaaaagacttggacaaagctgctacaygtagctgctgcatttaggatcaatccaggtagaacaaaatagaagttaatcagatggtctggaccaccaaaagtttttgacttttacaacttactagtackgtgaatttgggtaagttatttaacatcctcatgcctaagtttctctaatttatacaataggaatgataagaatacctacctcatagggttacagayaagccatgggaaatgcttagcatggggtatggaacatggaagctaaaactggctataatcattattgtgtttccaattgctcttaaatgtactaatttttactctaagctgaagtttttgatgctttggtttatatacacaattgaaaacacttggaattaaaaaaatagctgtctttatttcaaagcgatactgagagagagagagaaatagataaaaataaaatgaaaatgatccccaattttactaaccagagaaagttgctgttaatatactagtaccaattcttccagataattttctatacttatttacaaagtatgtatcttttgacaacagatgtataatttaaacagaatgttatattccacatacctgaatcattcatctcaatttttattgtgaatatttttctgcagtactattcttcttaccagaaagctctatcagatcatttggctatttcaacctaaggtctgattaatcaagtgtgaaacaaaattgaataagcagacaggcaaactaagcagaaatctcagtaaattttaatgtttgaatcacctgggtcctcaaccagctatatattttgtaaatgcagtgttttccaagtacttacctagaaacgatagagttaattcaaggaatcgagccattgcttttcaggccttrtttgtgatgttcattttagtggtactgcaaagtgagggaattaacctcaacttcaaacccacgtctttgatctaaaatactcgacagaagcctacaggcttcctctaaggctgcagttttaaaggaggcattttcatcatgactatggtttttagaaattgtaagtttcacagttttgaagaagaattagtcagggaaagtctcccaaagctctcctctgctcccttcctcctccccacccttccttattcctctggctccattatgcaagaagtattgctggtctgttaatattgccaacattctggatggtgctgagacataagaaaatttccagtgatgtaaaagatctagctttattctcwtttttaaactcatgtgggcaataaatgagtggataaaatttcagcaaagtttccatctaaagggacattcttaactccaattcttaactcacaaaaccatggagatattcgaggacagagataggcatactgcttttgccatatgaaaaataaacctgtaatatatattttgattctggtactcattgcaccttttaaaagagggtcttcttggaggtagaaggaagaaaatcactttaaaattttttattagctactccaagggtagatctgatattttatttatcttaacctaaatatgcttcataaraatctaaraaatgctgctgtggatcagggaagaggcctttaaatgtaatgttttgtcttcgaggtctctggaggggagagaatgggagtgtgatattgaggagagttcttttaggaccatgtctcaggttccaagcttctctagaaataggcaaggtgcttgactgcatgatgctaaatgttaataattataattatggattactgagtatttgccatgttccaggaatgcacagatgaaatataattaattgcataatwtctttcaataaatccaggatacaaggtaggtgttagtgttatctccatttgataggtgaggaccttcagacttggagaagtgaaataaccttgttgaagtcacacagttaccaagttagtaaaccacctgttgaaatttaacctatatctgttagaatatttactaccttagtgtcactcaaccacactcatcygtggttgaatcttactgtgggtctctggggttcccccaagttcatgcttctcttgggttcaggacagcatttacgcactgagccagccatgagtggcagtaggctgtggtccttgggctggcccatctgagaatcccgagtgtctacagcgcttccccaggggatggcgtcattgatgatgaatggcacattgaggctggagtgaaggaaatccaacagagactagaggaaagagcagcaggcacggactagccgcccactgctatccttcctttcctaactgggtcctctcatcttctcttctttagggacatgctgtctgttgaaagcaaggatagccatgcctgctacctgtcttttagtggctccttcatctccctagacaaaagtcaaaactcctttccttggcatcatctgttcttgcctatttcttcctttatgcctcctgacattcccagcctgcatcctagatggaagcatatccagctgcttacagtctcccaaacacatctgtgtgtacatttgtgtgtttaaatgcctttgcatgtcctgtgttctgtgccctttmctcttatgtattgtgtgcctcaaaactccttatttttcaaaatgcagctcaattatatcctcctccatgaaaaattccctgtctcttcatgcagagtaaggtattctttcctctggattctcagagcatcccataaattcctgtctaatcatgtgtgacaagattcaatagtgtttctcttattttttacttccaccgagctgtgagctccatgagggcaacaggttkgtcttggaactgtgcatccctagcgcctagcatagtgtctgtaagtgttcgayaaatcttacatgagtggattaacggatggatctggaatcacaaamcttaaaagtagaacttaccctctttgctaggatgctgtctgacatttggcaaatcacaggacctttcaggaccttagcttcctcacccttgagatgaagatcttgaccatttcctctaacggctcatccttagagcaccattagccagtttaacaatgaggtattaaggagtctccaatggcaactacttttcagcttgcttctggctaaaatcttgatgttagtccaagtttttgaagtgagtgatttcgactgagagaaaggacactgaaatctatggagaccaaaatggaatgaaaaggttgttttatrataggaaggcctcggggcttgtttcactgtcacaggctcttggaatgttcatattgggaggaacctaagaaataagtccaatagcctctttacttcatatatacatatatatgtatatatatacacatacatatatatgtgtgtatgtgtgtgcatatatatacaatatatatacattaagataaacaagttatacttaaaatataaattaagttacttgctcaaaatcccagcactggtctgaagcagaatgcagcctctggagtctccagtttgtacccttctgctgcaccaagcatttgatctctacaactaaaacaatatgttgaataatattgactgrtaatatatacaaggggcaaagtattaatgttactctccaagcttctgtttcacagttggctcagtacggagaatacttaatgacatattaaacacctttgattactctttatgttcatattggcttggactttcctgccaaatgcagcacaagttaatggacaatttgttgtttgttgtcttttttcctacatcaatttgaatagcatcacaaagggtaaatgaagagtaaatgaagcctcataaagggtacttgacatgacacaccatgctagaagatgtgctaaaataacccacttaagcctcagttagtggggctccagcttcatggaagatgaaggacacatcttccagataagaaactggacagtgtgtgggcaatatagagcaagttctgatgtcaaactctaatgatgacatgaatcataaaggcttggaattgttatatattgtgtctaggtatgaatcagcaggtcaccttttctcaaatggatggacctgttttccactcttaaaaattttacatctgatgaatgtatgaattaactattgaggtataacaaaaccatcccaaaactcaatggcttaacataataagcatttactattgctcatgagtttataggtctgctggatatttctctggtctcagtttgggtctgtagtcactgtgggtcaggtaggcagatctgttgatcatgacttggcactcttgtatctacaggttggtatagaatagctttggctaggataactagcctctcctgaacatggtttatcactatccagctggcaagtcctggtctttctttcctttcttttgactttttctttccttttctgcctcccctccttttctgagttttactctgtcacccaggctgaagtacagtggcacacagctcaggctcattggagcctcaatttattaggcccaagygatcctctgatctcagtctcccaagtagctccaaccacaggtggcaccacactgggctacatttgtaatattttgtagagatgggggggtctcactatgttgctcaagctggtcttgaactcctggactcaagtgaacctcctgccttggcctcccaatgttctgggattacaggcatgagccactatgcctagccaagtccagactttttctaagagtgtttaagtctaactgcaagagggagatcaaggaaaaccatgrcagtctcttgagacctaaccttgtagttggcacatcaacatttcatttgtattctgtaggccaaaccaactcacagggccagccagaatcagaaggaagaatgcaaaattacagggcaaagggtgtggatgtaggaaggacattaattgaggcttcactgcaatcacattgaacacatgaatatgtgttcataaatatgtgaaaaacacagaattaggcagagtaaagggaaaatttcctctttggtcttctactgttctactttcttccctaagttacactattaataattctgtgtattcttccaggcctttatgtgtgcatctctacatagggatggggagatataacttcccttgacaaaatgtatagctctaggtagactttataatatatttttatttaaatgttaattataggttgtatatcccttatctgaaatgcctgggaccagaagtgytttggatttcaatttctttcaaatgttagaatatttgcatatacataatgacatatcttggggatgggacacaagtataaacatgaaattcatttgtttcatgtccaccttatatgtatagactgaaggcagttttatacagtatgttttaacaattttgggcatgaaacaaagtttcgactgtgttttgactgcaacctgtcwtatgtcaggtgtggaattttctacttgtgacaccatgatggcaatcaaaaagttttgaattttggagaattttggatttcaaactttcagattagggatgctcaacctgtrtaaaataatgttttaaaatacagaaaacacaaataaaaacttctatatccatcactctgattaagtaatagaaatatttgtaacatagagattttccttttataaagaaataaaatgctataaattggaatataccaccatgtatttattaattgcttatttattaatatttaggttttgtatttttttgcgattgtgaatatttctgcaggggacattcttgcatggctccctgtgtacctttgtcagggtttccctagagtaaacatctacacatgtaatttatagatctatggcctctgcatcttcacctttactagatattttcattctcttccccaaaagattggtaccaacttcctcacccaccagaaggatataaaagcttccccatatcttaactcacagttgagttattaatacttctcaacctggtggatgtgaaatgacatcacgttgttagtcattttacatttctctgattattattgaagttgagcatcttttaatctacttactagattttagaatcattttgctagtgaagtattaatatatatcctttgttcatttttatatgggattgtttggctttcttttcctgacttttgtaagttctttatgtattttggagactarttatctgtgtcttacctacattcacttattctctttcagtctgtggtttstctttttgcttagtttatgttatcttttgggtattgaggtcataacagaaactttggctaatttgtttttctatattctggaacagttgaaatttaagatggattctggcaaatctcacttctaaacctctttttgactactgtttaacatctttaataatttatatatttacagtagaaactaagctttgcttcagccccctgggctgcgttgggggtttcccaatcctctcctcaaagcctgtgcagccctcatgggtcaagtatctagtttaggttctctgctgggccacagcccaaggccaggactccaggcccagcctctagggcctgtattcttgaaaaatacacctttgggatgtcgcatgcagcccaggtccacctcatattcctgacttttacttctgtatttattcatggcttctgagaacctcctatctttctcttaatttcagatcacattataagatttattttggatatgtttgatcctgttttccattgttggtggtcagaggaatgcccatgtcagcttagtctctcaggttgccaggagctctctggacaggcttaacatctgattttgatgggtactattagtatctcttggctatagtactgatctaaggacctcagctttatttgcttgttaatagatttagcacaagaaggaggtcagcagatctacctggaaagacagaaaaatattaatatacattttcatctcaggcattttatatttaaactttcatcaagcacgtgggtgaaacgagtcctttagaaagaaagaaaaatattaaggctatgccttccttmgacaagtgaaatgctcttttagcaaatatttgacaaatgtctaaatccatatatgaatgtaaatttgtctgtttactctcgattgagctcaaggctgactcacacccatttgcagcacttgttctgtgaacatgaaggactctatagtcctaatttcggctgcctcaccaccttgcacatacacggcgtcaatgagagagagggaagaaatggataaggtttcaccttgaatcamcccaagagctattccttcctgttaaagacaaatggagtctgggccaatgatttaatggatttgatatggagaagatgtcccacaaggccccaagcatataccaacttttgtataaaatgatctgtaagttttgtgccagcctttgatcttacccttaagacaggggtctgagrttggaggaccttgacttcctagcctcctattggtgcctaccacacctgtctctttarcatcatctttagctactttgatctgcctgtgcccacaagatcagggctctgccatgtgtcccacagtccctggctgcttgctctgggtagtggagagagaaaaaagggactcagaaacccagggcactggttgggactgaattctggcatcttttgagtgattgtgactggtgtgatctctggattcctgaaaacttggtgactctgaccattagtaatttgtcagtttcttcagatgtttctgaacctccagtttcatggggtccaggattcccttacacctgccgatctgataaaatctagaatsttgcttttcaaagagagagccaaaggcccagcagctttggcatcacttgggagcttattagtcaggtcccacctgagacatattgagtagaatttgtattctaataagatccccaagtgattcatatgtgccgctctacttgactgaatttcaactcagtattgggtatcagtatcaggatccttttgtcaaaacatgaacctctcacaataatggacatatcccccttcacctgcccagtgagagtactctctgtttaatgaccagttctcatgagtctgtgctactggtggaagtgtggctgtcacttgaatgtgttagcaaaggaaagaaaggttagcaycggtgagtctcatcttcactctgcctgtttctgacctggaccacaccctgattcttctgggctgagcaatatttaattatacttctccaatcctagctgcactggggacttggactaggacattcacatactcctcatgctctgcacctccctgctgcatgccgggcgagcagtagcacagaccaaggtatttggcttattgtcatggagcagagcaaacgtccacatccacccatctcaggtctaggaccttggccttgttaacactgacctctaaactgagcttgttactgtgatgttccttgtcaggtaatgagtgcttaagcacccactgcttccaattataatgaattattggcaatatgggctcagccctcaagcaactttcatagtctgaagtgggcaagtgatataaagaagagaggacaaaagacatgcagaatggaaaaaaaataatagcatgtaggcctgccaggtggttatcttggaccacacggcaagtatttcattatcgggcagttttgacacttaaaaaatagrtacgttctcaatatagtaacgatggccttccatactatcacttgattattgggagtgtagatgcttggaaatttgcttgctcatgtaatcaaaacatccagaaagtagttttcctgcctgattctttttgaaagtctggagaagtcaccttgccaaattcactacccaattcatgaggttaacaggctttgctaattctctcaagtttttactccaactcaagtgaggaaaatattgcagaaaggtatgccaaagtgcattttaattataaaccaatttttgttgtttaaagaaagagaaagtttctggttatcctatatatttggaagaaaatatttatggcccacctgaggtaagagtggagggacttgccagcagatttttttaaaagaaatgtttctaggtagatgtgatttttgtttataatattgattatttgtaaatctctcagacttttgggtttatagattctgcaaccacggttgcatttgagtattatcttgtttgctatttttctggaagtaaaagttaactatttaaaaaaatgacacgaacttgtctgctaattaaacactttctttctttcttttttttttttttgagacagagtcttgctctgttgcccaggctggagtgcagtggtgcgatctcygctcactgcaggctccgcctcctgggttcacgccattctcctgcctcagcctcccaagtagctgggactacaggtgcccgccaccactcccggctaatattttgtattttttttttttttttttagtagagayggggtttcactgtgttggcyagggtggtctcgatctcctgacctcatgatccacccgcttcggcctcccaaagtactgggattacagccgtgagtcaccgcgcamggcctgaaacactttcaaataagtatattttatttctaggaagggatttaattttcttgctttgattatggcaagattttatttcaggaagtgcagaattagaattgtttctgctgagattgaaaacgtccactggatagatgtcctttggcccagtgtttcctaagcacatggccaaagcagtgcagggcactgggaagtccccatgtatgatgacaaatgctcatgactaatgagtcagtgtgggcagataggtagaatttcaacattgatcaccatcctgtataaaaacctgctgcggagatgattaactaaaatgtataaaactctgtccctcattatcagcacctttttatcaaggtagttgcaaacagatagctagaaaggggccaactaagcaaacaatgctctacagagtccctttttcgacaatgtcwtctgcattgcttacacagtgggcactggctccaggctgggctcttagccgggacaaccagccaaggaccaaacaatccagctggacaaatccaaaagcatcctcaaaggaagagaaggaacaacaacaacaacaaattgaccccaaatgacaatcatagaagacagcaagggatattatagcataaccaggagttctggaataagtctgtgcctatatgaggttaccagtagaacacttcaattgggagctcatctttaattttgttttgagtgatggaggatcaagggctcttgtctacatggtgacaacaaagttgatggattctggtcttagctctgacactgctgagcagtgtgagttggacctacatactcctctgaggcctcagtgaagagggtagcaattttaaccattccagtgagtgcccaccatatgcggccaagatggtctcagggaccatggcattagggaatggaagcagatgaactgtgaagccactcagcaagaggctccatggctgagaaaaatcagcttagaaaactaggtcagacctgggtggtgactatatcagaaacctgcaagaggaaacactgtaaatgcattagccagggcaaaattgattatttaaaaaataaagataaaacaatggattaaataagccatgctaaatagcttctgccctgatagaaatgggataaataattggaattgcaggtgggggttagtgggaaggttctattttaatccggaaaagaaaaagactcattttcccttcagtttcaagcatgtgctttagtttcagattcatcttcatgttacaggtgaaagataaaggcccctggtccaccctggatgtttggtaaaatgattacactgattgtcccaatcagctccctgaaggttaagataacattttctttgcagatatacttttagtttgtaaaatcattaagttttggaggatactggatgacacacattgctgtaattatcacttagcctgcagtggtcaacttagttgaacagaatgtgacactaataagaaacaatgttgtggatgcaatctcatgcaagctatttgacttcacagagtggaggaagtctgtgtttcatgaatacatcccatctctggacaacaggcttgcaaaaatagcattttggtatctactgagattgggagagaatgaatatgtgtggtcagtatgggccatcagtatgatgagacagatagcacaaagcatttaccctacaaccagtgggtctcaaatacatgcaggcacaattttcttatgatgaggtatttaactattttatgtagccataactatagcagtaataaagtttccgtcatccattatctgaatgcttactctttctaggcatagtagtaaccaggtgcttgaattttctcatttaatacccatagcaacccatgagggagatattgtttttccatgttatagatgaggaaacctagtctcaaagatatgtggagacttgtccaatatcagtcaattagggagtgataattcaaagactgggtgttcttatttaggtggactcagctaaataagggtgacatgggaattggcttctcaaacctagaagtatatttttattttatcacattgatcatgcttttcatgctaaggtatcaatacacatggtaaatgagtgaatgccctgattgaattggtgtctttcattaaaactcaaggcactgggcattttatggcttgccaacctgagaaagaggtcagtctcatagaacaatgatggttaagatgcccatcttctgattgatagagatatttttacaatcaggtggcaatgattttagacaaaattaattgaaatcatactatgaactgggcattgccccaagtgctttgtacattatctcatttgatccacaggaaactgaagcacagacagctgaggcttagagagtctaggtaagtagctgaaggtcaggttgcctgtaattgggagaactaggatgtataaacgatccatctgttttcagaatcagagcacttaactgcctgtatactatgtgattttattttctgatatttgttactaaatatttgcacatgtaaccatttatcaattcagataactttatgggattccttcttgagttgatcaagtgatattttactattagctttaaactattgaaaaagaagaaaattgtcttaattttacaattctttttttaagataaagtgttttcaagttgaatatagttttacttattcaaatggattttcttagctatgctttggtgaggaatgctggattttaatgcacttactactttatcttataaccacctcttctttctaaagtgacagtttctaggtcctcacctttagctcatgcatatgtatacacaatatatagactttgcactcaaaccactttgctttccaattttctcctatattaattagggtacaggtttggcagctgtaaaaattagatgtcaaaatgtaatacttcaaacaacatagatgttgtttaggaaggcatttcagggagggtaggcagcttggctccatgaagtcaccagaaactcaggttctgtctcattgctctgcatccccaggcaactgtccccatccatgtgctcagtggtggcaccctccttcacatctgcattctggcccatgggaagggggaagggacagagaaggggaagggacagagaaagttaaggacaaaaaatttcctttataaacatgtataccattggctaaaattcatattttattggccaaaatgtagttatatgaccatgtctagttagctacaagagggggttatgaaatgtaggctcttactgagccacctttctggtagttccttatctaaaaggacaagagaagaatggacatgggagataatgaatagtctctgttcacagcttgtctccctagcatctaagtatcccttcctacccttcatcccacgtagaggatatgcccaccttcttcccaaagaggcaaaccaaagcccatttatttactgcacccagctgagagtccaggtctctgggatatgtctaggcctctctatcagggtggatgtgcctccagtgaccccggcactaaaggacaagttatctgccatgaaatccctacttggaaagggaaaagaggaggaggcaaacagcataatctagtcagtaggagttagcgctttgttgttgttgttattacatttctctgggcaagaactacttggcagtctttattaggtcatcttggccaatccaaactcactctctgggtataactccctgtccattgtccttgatggcctctgtcttttgtggccacatctgtggtgggtgttagataatatgccctcattggtagcttccctccttgtacagcttgctttctactggtgcaggtttgggaacctgagatttggtttagtgattcaacagtcactagctctgtcagccaggtttttgttttctttggcaatgtaatacccgcaaaaattccagtctgtctgcttccagttccacattaaagtagcctttggctgtagtttttaactaccttttgatttattggctttgtagcttatttattggtttggtagcccactcctaactccctcagtttaagggcttcttccttgaggtcatctgaagcaataggctcgaatgggaaatccaggcctgccctamctgaatgtttgaactggctgccattgtgtggcctargagaatataggagattcttgaaggatgctctgagcaacagtcttaccttgtactgcttggggaacagaaaaagttggcttttctagcaggagtcctcagctttccagctgtcaatatctgtatcyctgtccttacagcctgtgaccctggtctcagatattgttatggcaatacccacttctaggtagaaactgtatattagaatacaggctaaactgctgtaacagagatttgtgaaagtagcttaaacaagctagaaatttctttcttttttacccaatggtctcaatcaaggtgggtaggtggcccaggatgggtgggtacttcttctctgcaacattgattagagaaagccccgattccttctgtttgttactctgctgagtccccgggggttgctctcagctgcagcactgaaactggctcccacaatcctgctcacattccagtctgcaggaaggggcaagtgggagagaaagtggagggtgaacattgtccttaggaaacatgagctgaaaggtatacacatccttcctagttataccttattggccaagacttagtcctttaaccactccgaggtgcaaagaaggctgttggaagtagggaggtgtagtctccagtgggatagccatttgcctaaataaaattcagggaattctataactaaaagggagagtgaasagcggatagtggggggagtcagatagtctgtaacacaatcctattgacgggttataaaatgaggttaaaacatgactggagtcgtggcaagcccttaaatactttctctttcctaaggagcctatccatcatgaaaagtgataggaaagaaaaatctcctctaggtcctgttactcagctctttccctgtgttcttacaaatacaatgtgagttgagttttaagaaaaaaaatcacaggacaagtgatcaaacgttttaagttcaaatatcgatcattttctgagttcctttcagccaaccacattatactttaatcatggaaacgtatctgtgtgtctggaaaggtggttataactagttccaagcagcatgatttagatggtttttatcttttcttaatactgccattgttgcyagcccagatagagtaattcaggcttggtagtggtaatgtttgtctgagagcaagcacacttacgctggtgaatgaagaggtaaaaatgatgagcttaccctgtctgaatctctgctgcccctgaaaacactgaacctatagacgaaactgctttctgagtttatattgaggaacaaggtttatttaggatgagaggaggaggaaaacacagaggtggcatcaagcctgggaaagtgagtagggttggaaaatgtggtttcaaaggtatacatatgtattgttttctkatgtggtaagttcatgtggacatctataagcaatttccttgtcatctcagttgaactgttatcatctctaacacacaattgtcaaaattcacttctgaaccttgctagtgtgcacacctgtgcctttgcatccctcaccattcagtgagttgacaagtaactgcagatctgatgctctggcctttgtctcattcagaccttgaaattgttcttctcctcccccatgtccacatagcatctcctcaactctgataacatacttttctagtgttttgtgagctttagttgctgccatcctgcctaggtgttgaagattkccagttctagtaagtttgcattttgcagactctaccatggtatctctgccacctttgctgttagtagttctgagctaaggagttctgggtctcagccaaaacagtgaactgtgtctttgtgtccttcatttcctttccctcttgtttttgcgtctttgccatggaagtttccctcttcaacctaaagccctaggtaccctaaagtgatctacacaaacatgatgcctctctgtagtttcatgctttgtttttaaaaatgtagaatgcaagatttgcattctactgagatttcccaaacattgtgctagtcccagagaggtgacagagaatgaaacagacatggttcctgctctcatgggtccatagatgatgttaccctatatttattgagcacatattacatgacagacatttttctgcattctttacatgtacaagatttgcattctacagcataatttattcatttgttaaataaacgaatgatctaaattactaccagttaaaacgttcatctccctatgcttccaatatttaagaaaaacataatttgcaggaaaataagctatgtttatcctgtggctttgcacaatcttttgacacatggctccaaacctccaaggagtcaaagtattcctctttgagaaacatacactatcttagtcaaagaaattaagctctaactgtgagatttatgctaagtaatattgcttatgaaggcaaagactctctcagaaagctagaaattatatcacagaaaagactacctcctttagatccagtcctaccaaccagccattctagtttctgcccatgtctcatttgacccatgtaagtgtttactgtctctcttttgaccctaactacaggtacaaagaatctgagatttctgtctctgacccttaagtgtaatctcatactatttaatgttttttgactttaatattgccagtcatttgaagatatattttattcatttgcctttcaatttttttgtattgctatttctctggcttagatattgccagtatgttcatttttaactctgtggtttaacctccatgtacaccattattaaaatcaattttaaaaagtcataagcatgctgtggagacccatcactgaacatttttatgaatgatttagagtggggctaaataattacattttgtggctgaaagactctcagttgataagttagaggaataaaccatttttttgccttcttaaatatatactagagctatgtatttttatatccattttataatgtagaagcatcttgatagcacagttgagaactccaggggattttgcctccatccacatttctctaaatctgactccttaagtatttgggaaagaacttggttaagtttaagtatcaacatcatgaagagttgtgtggggcatacaaaaggaacaatgtcttacccctagcaactggggaataaggagacacagtaaacatgtatcaacaaatatatcaagggcttaatgggtagcaaagaatgaagtgattaagtattcatgccctccacatgtattcactaagctctgctacttcccaaacattgtgctagtcccagagaggtgatagagaatgaaacagacatggttcctgctctcatgggtccatggatgatgttaccccatatttattgagcacatattacatgacagacatttttctgcatcctttacatgtactggttgttaatctttacaataacattatgaggtatgaaatacatttatttacaactaggaattgttggaaccaagatttgaaccctagcatttctctccacagcacagagcccttgacttccccactgtcctcctacattatcagccggtatgtccagagttattgacctataagctgtgattagtgctaagaacaccaggtgctgtgagaatttaattgggattggtaaatgtgggttcagagaaggctacatagagaatagttaaaagtagccagtgaagtgtgaacggaacagagactggaccaagtcatagagcttggtgtgttcagcttttacctgactagaggaaatttccagataacattcatccartccttaatctatgttcttaactctttccaggatgtactatttgcctgcattgctcttcgcacctgactgtacaacctaaaggagccctccccttgcttttctgtagctttgaatccagtccctttaaaaatattttctggaggagaggaagataaatgtgtttctgtcaattgcattctgctgggggctaagccacattgcagctgtgtttgtgatgctgaaggcgtcattcttgtaactgtgagaggatgggtctttctaggagtcagcacacataattccttagagaaagaatcttgggcttttcactatcagagtcatcctcattctggttttagcctttcctggatagggataggtttcagccactagaactctgacagctctcttaacttactgcttcttgatatgatataactccacaacctgagatctctacttcatttcatagccaatcttgtcttaatcggacatttgagggaatccatctatctctctctttcttgcctccacaatctgaatcacacaaattcatttctgagagttcttttgaatttttcttctttatgtgacctataatattcacccctgcctggctataagggactattattcttttttcacatatcctaatttgtaagacctgaacctctccaagaaagtggagagaagaaagtgcttaactcatttcattaaacttaatttgtagtctctaggcatatttgtatattatttacctgctaccctttgaatgcaataatatgccttaatatgtatgtctattttctctagcaagatagtgtactctttaaggtgagcaccatgcttttataaaataatttttctcagaatcctgtgtgttgatcaaccatggatacacaggaacgtgtcttaaataactaatactgtggtaattctttattcagttgtctgtgattttttttgtgtagtgccaaccttgaatttagtttgtcagctaaaaatacatcctttattttatattaactaatgataaacaatttaatcattgattgacctttcttaacttccttacttttggcattgaggagtattagcctttacacactttggtttccactgccctttaaataaatgtccgaatgccacaattaacttaatagattctaaagaaagactcatagcaaaggcaaactaaacaaagtagtcaacctaccaaccaacataaaacagtcttgagaatagaaaaaatcatttatggccatcttttmgagatgctagtgagattcctgcactggtaaggttgacccaagattacccttaagtttctttctaagatgctattttaaaatttacaggataaattaaagaagaagattaaaaggaatgttaattagcatagtaagtagaaaaatgagggctttggaatttgttgtgagaagggcaatagttattttgagttagatgctaagtgctgtgtgatgctctcaaagcaaccatgataaattattaagtatttgtaatttattatacacatcagaaaatatattgcaatgtgagctgatgtcactcaatagcactggctgaggcatttgtctagaatgttgtgtgagattgaggaagcagtggactcattagtaactcacattgttgcaggagactgtgtttttcttcctatgaagttttttttacaacttcaaactagaaaatgaagaattataaagacatatttacattgttcagttgtcttggtgagacttctgccctctgaaattattgagataatactagtattttccaaaacatgaatttgacttctatttgaagtaatgttttctaaattctttattaatattttgggtttttgactttttagttatctgtgaatgatatgaaatgctattaatctattgtttgttaacctagttacaagctacatgtcctattatgctcagtgcaattttataaagaataatttatactaaacatgcaaaagcatgcctcaggtaaggattaatgcataagcccctasagattaccatttttcacagaatctttgcaacctgagtattttcatgtactgattcaaagcacatcattgaatttgtatttggaagagaataaaatatattcttgcattttatttcttagcaattgtaggagctcttgtcatatgctgtggtttgttagctctggcacaccttgaaaatctttatttcccattactcctgaaaattattttaaaaatcatcctctattttaactaacgcatttttcccttggatattctaaattttacctccattccaatgcattcagtatcatctctgctcacagacaaattgtttcactgccyttgagaggatttcctgaaaacttcaaaagtatctctccatctgcaccaagcagtgagcctgctggagagaggtggaagcagaagtgagsgggtatgtgagtgccagatggatggggacagaggaggcttggaaaagcagacaragagagagttcaggaacaggccagggcatagcaaagagcaaggattatgaatacaaaatacacctcagttgcaaggtgaaaagtagcggtctccaagaattctgactatgaatatcacttataatactcggctcacatgaaaacatttaataattgataggaattatcagctcataatcttaactatgttttgtaacccattagaagttagaaggaaaagtggccatgaaaactaaataggataacaattaggctgataggatgatggaattggattatcagaggaaatgaaaacttggttgaagacccatcattattatttgtttaatattgtgctttcccttgtctagaaccttgtctgagacctcatctgacattcctgaggcaaaaacatatcacagtcagaaggaggactcggcaagaccagagcagtgtgtcctcccaaaagaggttttcctcttctgtaggactgccgatcccttggttaatttctaaccaacactgagcaatttattttgtatgccagccactgttctagctgttttgcatgtgctagctcatatagctcatgtcagctcttatgaggtcagtactactactattgccattaaaataaggagaaaacaggcacagagaagttaagtagcttcagtaagatcacacagccaggaaataggaactgggttttgagcacaggcagtctggctgagagtcttcattcttaatcactgttgtctccttcctatctaatatagctcagtaagggctttgctccatgagaatcacattctaattggtgaagacacagggctatgattcctttcttatggcctctgttgatggagactccacattcatctttagcttctatattcttattaattcaatgaaatacatgaaagtatagtataaattgcaaagaccaatacaaatattatttaattatctcccaaacaggggaatttgtcccttaggtcctccttaagtttaagtttctttatattttaaatcttgtatgagtacagaattctgctctgtactcattctgtatgagtacagaattctgctctgtactcattctgtatgagtacagaattctkctctgtactcattctgtatgagtacagaattcaaaaaggatagacactagcctcatgtggctgtttaaatttaaatttaaggctggaaatggtggctcatgcctgtaatcccagcactttgggaggctgaggggggtggatcacctgagggcaggagtttgagaccagcctggccaacatggtgaaaccccgtctctactaaaaatataaaaattagccaggcatagtggcctgtgcctgcagtcccagctatgcaggaggctgaggcaggagaatcgcttgaccccgggaggtggaggttgcagtgagccggggtcgcgccactgcactscagcctgggtgacagagcaagactccatctcaaaaaaatacaataaaataaaaaataaaaataaatttaaaactcagttttttagtcactctagctgcatttcatatgctcaattgtcctatgacgctagtggctgctgtcttcaacagcacagctatagaatgtggtcgtcatagcagaaagttccactggctagcactagacagattacaaaaggcagtatttcctttcaaatggggcaacataataattaaatcacattggcattggactatcttatttttaagcttttttatgcttatagaattaatatgatataatgtctcttccccttggtcttcttgcttacttattaattcctttaagcaaatttccttkttcttgttcctttygttttcctccttttttctacttcaattcctccttccatactgagtatgtgtgaaagcagctgccagagcccattaaatgcatcaacacctttgcctgtggacagtctgcttccagccttgcttcctcagacaaccttttctgacctgcaagaggattctctgatacagccagattggacctgaggttctgcatcacccttgaatacgtatttttttttccctaaaagtgttcacactttctttttaaaatagttttgtagttcctcctattattataagggtagacgtcatatttaatgtacatgtcaaagayggtatccatattatatttagtaagtcacacaagatgaactattttatgtatcttttaggccagcaaatgctttaacagtgccttgcacttttttttttttttttttgaggcagggtctaactgtgttgtccatgctggagtacactggcatgaccttggctcactgcagcctccacctcctgggctcaagtgatcctcccacgtcagccccccaagtgtctggtactacaggtgcaaaccaccataccyggttaatttttgtgttttttgtagagatggggtttcatcacgttgcccaggctggtcttgaacccctgagctaaagccatccacccatcttggcctcccaaaatgctaggattacaggtgtgagttaccatgcctgggcaccttgcacattattagtttatactttaagttcaggcacatgtgcaggatgtgcaggtttgttacataggtatacatgtgccatggtggtttgctgcacacattaatctgtcatctacattaggtatttctcctaatgctatccctccccttgccccccaccccccaccccccaacatgctgcagtgtgtgatgttctcctccctgtgtccatgtgttcttattgttcaactcccacttatgagtgagaacatgcagtgtttggttttctgtccttgtgttagtttgctgagaatgatgatttccagcgtcatccatgtccctgcaaaggacatgaactcatccgttttttaaggctgcataatattccatgacgtatatgtgccacattttcttaatccagtctatcattgatggacatttgggttggtttcacatctttgctaatgtgaacagtgccacaataaacatacatgtacatgtgtctttatagtagaatgatttataatcctttgggtgtatacccagtaatgggattgctgggtcaaatggtatttctagttctagatccttgaggaattgccacaccgacttccacaatgtttgaactagtttacagtcccaccaacagtgtaaaagtgttcctatttctccacatcctctccagcatctgttgtttcttgactttttaatgatcagcattctaactggcatgagatggtatctcattgtggttttgatttgcatttctctaatgaccattgatgatgagctttttttcatatgcttgttggctgcataaatgtcttcttttgagaagtgtctgttcatacccttctcccactttttgatggggttgtttttttcttttaaatttgtttaacagaccatttgtccagtcacaagtagcagaaacttaaaagagccctttgatttttaaagtcacaataaacaggctgggcatggtggctcacacctataatcccaccacttttggaggctgaatagggaggattactttaagccaggagttcaaaaccaacctagtcgacatagtgagaccttgtctctaaagaaaaaaaaaacatactaccaagtgtgatggcatatggctgtagtcctagctacttgggaagctgatgtggtaagatcagttgagcccaggagtttgagattacagtgagctgtgaaagcaccactgcgttctagcctgggtgatggagtgagaccttgcttctaaaaatttttgtttttaaatataataaaaataaaaaatgagatggactgtttgataaggtactaccactggaagacgttgaacagagactggagcattcatttatttattggttaatccaacaaacatgtatttaccactactaagggttcacactcygcaagacactgaagatacagagttaaaagtacatttctaaccttaaagaaccaataggctggttgggaaaatgtggaactagacaaacacagtgcaatggaataaatgctccaattagaggtttataatctgtttgaatgaggttatgaatgtccaaccaatgctgggaagacaagaagttgggaaggtctcctggaggagtggacccttgaaaggcatcttgcaggacatgtccagatgaaggtttgtaagagcatgaaattagttggtggcagatggttgtggagttactgatgtgagataagactgaagtctgagctaaattatgaagagccttgtgtgctatgccgtgaagttcagattttgtcctggaagaaaataacatgctattgaagtatttaaacagagaagtagcgttcaccatcagattgaaattttagaccacatacagtatgtcaactattgaactggaggcagaaatactggcaaagaggttattatagtaacccaggtgagaggtaaggagggcttgaactaaggccatggcagtgaggagaaagataatgatggctggagtagacttgagagggatttggggtttgaaacagtaggacttaktgactcattgaatgagggcaattaagcacagtgaggggtgtaagataattatcaggtctccatcaaagatattgctgcaaaaatttctctatgggtaaaagactaggttaaataatatctatagtcttttacakktctatgagctataatttaaaattttattaactttcagaactcctgatagcttacactaataatcttaaaatataatacgggtaacatttaacacttacatagtatgatgggatatcattttccatatattacattaggagaacrttaaccatacagtattcaatattggcaagtctgctatataatmatatatttctaataaaagtataaattggtataaatcttttggaaaacaatttggcactatgtaccaaaagctataaatayrttcaacctgccatgaatttatatcaaggatacagaaaacagaatataagaagaaagctatatcagggaaatatgtattgcagtgatatttagaactgtgaaatattggtcatgacctaaatgtccaagaagaaggagaagagtaagtaaaattggttacatcaattctgtgggatattaggtagctaagaaaatgattcctatgaggactatacaaggaatgactgtgtgccaagacttaaaccacatcttaggttcaaaatcaaatgttctttctgttgcttctcttgtgatagcatgataatgctcagtgggaaaccaaacacaaaaagtacatgcacattaataatttatggatttttgtggataaagactgaaagaaataataatttttaatgctgggatgataggaatatggacaatattttttttagaaatttttctttatgtctttgtactattactccacaatgatgttttaacaattaaaaaagtaaaaaataccaaatcagttttattttggtttcagaattgtattgtttagatcttcagctttcccacagattgcttgttattatccttcccaatttagaagagttagatatttaataatagaacacatgtgcagcaattctagtactgcattctgctttctaaaaattcattcagcacaaatttcacagaagcccacctacacttttgagctatttaatttttcacagttttatgcccatgttgtgctgtggcacccatgcaaaaataacttgaatgctaactattctgcagaaaaatagaagaaatccttgtgatagctctgaaaatgatgaatcaagtgctattttggggagtttttcatgcttaataataacaaatggaaaacatgaagaaaaagttcctgttttgaggtcttgctctcttctgtcacattctacctgaagttattaaccaccatcttccttccctccatttctatatcttttctttctctgtgtgtgtgtctcttctttgcctgtttttctcctggtctcacataaattgtggtcttgcctgctgagtttccaggacgttcactggggacttgttttcctggagtattgtgaagcagcatttatctgcctatggatttggttcttataagggccagtgacctctttctccttcgttttcctcattcaacttcttatatacattataagctcagagaggctcctaagttcattaaattcttttgcatgatgctgtgtacaattagagccagataagaacctgattcttactgacgtcatcagcttctaagattagtgtctttttctataaagagagagagaatcagaaggaagggaggaaagaaggaaggagggaaaaaggaaggaaagaaaaggaggaaggaaagaaagaaaagcaaaaaggcaggcaataccacccatgtgaggattgtggatatgagttggtagagggtgagaaaaacctgttactagaagacaatgtgccaacctgatgttgcacgagttactgtatctgggacatccatgagatccagagggattatgcagtctaatccctgttgtagaatgacataatgcaggaaaataacttaacatcttttgagttacatgattgttcccaagtttatgcccaagtgatgtttgaaatccgtgagatttaaaatgaatatttattatttggtattaaaatgaaggaatgccctatgaatccaataccttttatttctttcatcacttgcatcccaaattatctgtcagttgggatacagtccccttgccaggcatgggcctcagtgtgagaccattccccctattgctgatgtttgattctcctttctcttgtgtaaatgacgaggagcaaggagtctcttcattcagcaaggagtctagatgtaggtggcccatttgctgttggaaaagaaaccactcagatcctttctggagaactgtgaggtaattaattccagagcctcagtgtctaccatacattaaaaaatacatgtagatgtatttgaatcacagattaatggaatctgtgatttatttctcaaatagaactcatcaagtttcaatctgaatgggttagttcagactttgccaagaagctttctcaaacctcttctcttcctaaaagcactcatgccagagtttcaagctctatctggaggggttggaagacagccactgatatatttcatactctactctcttttcttatgaaacactactgaacacctaccaaagttataaactcgcatacttcatagctaggacactaaactctgccaaggtacatgactgcaaatacctacctctgggttctcacgtgtttccctgttctctgaagccattttgtccactgaatttcattttcttgtggyccttgaagtgcttaaaaaggattagttgggtaataattatgtctgtatgtgagaggactcttattttctttattatagcaacaaagataatattatattgcaaacaatatccagataaagtgtcagtagtggttttggttaaatgataggtcttatttgttattaaaaccaattactgatatatctgaaaagaacctttgacatttgggtatcagaccaattagggacagattagtaggttagtgttgacttacatgaaaagcagatgctttaaacccaggcaacatggattttcatgtggttcttattattttagtcaatgcaggttgttttctggattttgttcctaaaaatattaaacaagcacctattatgccaccaaaacaaacaaacaaataagcaatcagcataagataatacagtcacaggcataaaggtggagaaatgttttaaagagaaacctggttacagaagatgcttccctaacatacaggactaaaattatcttgctatctttaaactcttttttcctctgtattagtttgttcttgcattggtataaagaaatacctgagactgggtaatttataaagacaagaggtttaattggctcatgattctgcaggctgaacaggaagcatagtggcatctgcttctggggaggcctcagggagcttttactcatggtagaaggcaaagtgggaacaggtgtcttacatggcaggagcaggaccaagggagggagggggaggtgctacatacttttaaacaaccagatcttgtgagaactcactgtacagtagyaagggtggatgttgctaaaccattcatgagaactctgcccacatgatccaatcacctcccaccaggccccacctccagcattggggattacatttcaatatgagatttgggtgaggacacatccaaaccatatcatccccacttccacttaatgaccttaaaaatcagggccccaaacatgtattttacccaagcgatattgtatatagtgctactggacttcacagaaacccactgccctccccgtgcttttgaatcttgatccccaagaacaattrtttccaacccctttagctctttttctggtatttgtctccatttttcacaaaacattttcatgttgctatttcttgattttttttttagctttcattttgattgtctactacggaagacgatgacttaactccccacagtacacacattgcacatggatgtgcgtatgaacacacatacacttcctttcctccaatctttccagtaggattgtatcataattctgatttaattagtattcagtgcttgtattatcatgattctgcatttgatgttgcagttaatctagtgtactaaaataccatttctattcttaaacattttgtttttcctgaaattaatcatttcttgctttgtcatatgcttagatttctatataacttatcaattcatcctcaaactttgacagaactgtacatatcctttcagtatatccaaacacctcaaacagcccatccattcagtttcttttcttcttggagattcttctggaggcttcctttccctgctctaatctgggtgggatgatctttggacctttgatggctgttaactctgcttctcttcatcatcactttgagaaatcccctttccttctcctgtggtgaattccctgctacttggattctgggtcttgttcattcttgtttcctttcttggtttggaaagcttcattccatccctgagaagcttcctaaaaaaaggtatgcatggaaggtaaatgatttttttgagttttcttcatattttaaatagactttattctacctacacacttgatatatagttaacttgctttcttttcatttcaaataaaactcattttttcttataattttgaaggcattgctccattttcttctgacttcacattattgctgtgaaaatcctgaaaccattctgagccttaatccttctctgtaattggtttttactcacgagtgttttaaaattttgtgttaatattccttcatataggttttcttccttccccttcctttcttttctttttgctggtattttataactattttcaatccaaaagttcttattcttcagttctgagaaatattcttaaatttttctttggtaatggcctctattttctcttttggggatttcaaaattggaaagttaagcctcttgaatgaattctccaattttatggtcattttcatttgttttgctttctgaaatgttttctctacttgctcttataccttatctattgagatatttctatcrtctcctttttaatttctaggagcttcttcttgccctctgaatgtttctattcttttagcctcctattcttgttgcatggacacacttcttgtctctgaggatattaataatcttgaagttatctatgtatgtcttatttcttgtcctctaagtttacctcttctgtttgctttggttcctgactttcacggtaaaggctcctctcaaatgtctgctgtgatattaagagtgaggtgctgacatggtgtttgtgagccttggaggtgaggacaaattcattggccagtgggctttactttagctcgagcaggtggaattggtcatttagttgggaaacatccatgtaagtatcagtatgtcattacccttggaccagattctccagagaagactcttccaattttctgtatggggtttagtgggggcaggggtgggtggggggagataagttaggctactgcagtctggatgctaaacagggagaggggaccagggactatccattcagcatgcagacttttattctatagaaactcactatgtcttcagctgtgtttgatgtccctgagttcatcctctatagaaaatgactctctgatcttctgtgcagagggactggagttgagggaagggactttagagattttcaaccaactccattttcaaccccaccttctggagcctctggtacctccactccagggccttcatcatgttaagtagaacaccagctttgtttctgttggcctcatccccagccccactccttgtgggctctcactgagctttttctattctggtaagtcaattgcaacttggtaatcatctgcttttcagctttcaaaacattggtgacatttctctcctcttttcccckctttttttttatagtagacaacttagttgggtatttggaggaattagagtgttttagctcaggttgctaaatcaaaataccataaactgagtagcttaaacaagagacatttatttatcacagttctggaggctggaaagtctgagattaggatgttagcctggttgggtttttcrtgagggctgtcttcctggcttgcagacaatggccttctcactgtgttctcacacggtgaatggagacagagagagacagagagagatcagtctgatctttcctcttctaataaggacactaatcccatgtgggagtcttactctcatgacttcatctaaacttcattacctcctaaaggtaatactatcacatcagaggggtagggcttcaacatgtgaattttaagggtatacagacattcagtttataacatggaggtgaatgaatgtgttctattttccatgctcaacaagaggccaggccatgcaacagtcctttttttgctgctgctattagtgagtctcagtaacaggatggaagtaattgaaagggtgctgtatcaggtggctcatctccattttcaggtttttaaaatgggaaagacagagtaagagaagggaaggggaagggagagaaagggaaagttgagcaggatcaagaaataggagagagaaatggatgaggagaggaaaagcgaggctattattgaatagtaaaatggaagccattgttgtcttcatcttcagcccatccccaacactcctttcattttttttttttttttgaactgacaagagaactataatgcttcaatgaactggtcatcagacccctagcacctgaccaaggctccaatactctaacaaaaaataagtttttaagatccccagtcatgctttgacttgtgaagtcaggatttataattttgaattggaaaagttttctgatgtaccctctagttcatctcctgtaggcttttcaaaaagcaatttattgtatttwacatgatgttctattcccatattagaayttacataattcacagtactcatgggaggsagctatgtggtatattcatagaaacacaaaatgttgaaattcaaaggcatcttgagatcatcctgtcaagcacccttctttttacaaatgaaggaactgatagccacaaatgttacacatcttgcccagggtcatgcagagggaacatgggtgtgctccactgcagggatgagaagaggatagcatgccatgagtgaacttgaacgagtgcttctgttactctgtttatattccaggatctttttttttttaaacaagctaagctgcttttcacttgtagatatttacatgttatatatggttaagctataacgcatttgcaaggagaatgagttttatctagaagtcactgcatgaatggaaattgtggaaattatatcacagaaatktatgaagtaacaaattgttatccttttgtcatttgcagttctgatcggttttcatttttgtgcttgggtgatgttgggattgttgaaagcttaacgttcttttctaagaacccccttagataaacaataccatttaatgcagaatgttataaaacaccggctatatttcctataacactgagaatgtagatgtttttggtttcagtaaaagattgtttgacagtgcatctttaaataatgcaatattgacctggcttgcacattttcagaatttccaataataggaataaatttttaaaaacctattctcacaagttctgatgtgttttatcattaaagtaaagccttgtagatagctgttgtgattacattttattgagtccagctgaaatccttcattcttaggattgatgtgttgctatttcctcttccagtggtcattttaatggctaacttaattttttttctgtattccttctacagtaacatgagttgtctgcttcttattgtggaaaagttagattaaatctccttttgtacataaagcagggtgtttattacatcatatttaatgacaacattgtcaaaggaaatatgcatctctgtggactggtagtatccattagaaatagatttttctggtttttggctggctgaatcaagcataatctcacttatgaaatgttttctgacttgttgattctgatgcatatcaatgtatcatacaactattttttatgcttctctggctacgtaattccaaggccgctggcaagaaccagtaaatcttacttacagttgccaaattccattttcttggtcttttgtccctaggctgccctatatgatagcatttctcacatcaaattgtaatatttgtttacgtattgtgttgtttactgttatctcctgaagatgagggactgtgtctttttattcattcatgtaactccagattctaacagagagctcagcatgtagcaagagctcagttaatgctccatgagtgatgacaggcagacccgggtttatggagaaaatagcttgcaataggctcttttgagaggatgtcggtcaatgaaatttctgtccaacttgaaccagaccaaaaaacatttatctaaactgtgcakccttgatgatgtaaaactttgaagttcgcattttgaatataccaccttacctgttgatgttgtatttaattatgtacattgaggcaacctaatgaccaaggagacaattattgagagataatagcaaagtacagtaattatttgctattaggattaggttgacaaggtttgcatttgactcctcaatagctgtgtgatcttggggacagttttttccatgtaaaaataaatttataatgtttaccctactaacctgatagcattaggatattatgaagctgaaattagatattaaaacattagtgaaatagtatttttctgttcaaatatattattatttgcgatttgttctaaaagtagatctttcattaaggaaaaggtaatagaatcgtgtgtgtgtgtgcgtgtccrtgtgtgtgtgtgtgtgtgtgtgtgtggttggaggaggtccttgcatctcaagstactaattrtcttctattttgaataaaatctagtccaaaatgtattttgacaagagtccttcaaagaattatgctgggcatggtggcttccacctgtaatcccagcactttgggaggcagaggcagtagtattgcctgaggccaggagttcgagaccagctggccaamatagcaagacccctatctccacaaaaaacaaaaatattagccaggcatggtggcacacacctgtagtcctagctacttgggaggccaggataggatcatccctggagcccaagaaaatgttagatggcttgctatccaaaacatatctattcactatcctttctttttagtactatctgaatccaaaaagttaaaaacataactgcatttttaacctttttatgtactaaacacatggatcaaatcctcctatagggaatgatcttgcattacctagggaaacactacatgttacttgcatttccttgaaagactgagtttttaaatgctttgggtgctgatgtttgttctctgaagttcatttcctagtttggttactgccgtacattggtcattgtacaacccttgctcagaagggttatttggctaaaataataatgacctttctgctatcagtttcttctttcttaaattgagaatctcagccactgtatctgttgaaaatgctgctttgagcaaagacccctcactgtttgaaagctaatacatagcagaattcgggtaatgctgataagtagaatcagatattacttggtgctgagtagaagagtgcacatagattataagctctcatacctgctgttgatatactgttgagaatgtcctatctgcagaaggtatttggaaatgactttatgatatgtacacatataacacagataccaggatactttgcctttttctgaatgatggtggttttaaaatgtggatatgcttatctatttattagataatttcactgtatcaggaaacagtggcttctcatttattcacgtatttgtcacacatccaatgagtrttcacagctatcaggcttcactagacttagagatacactggggtgtttaattgctgcagttctgtaatgaaattattaattctgtaatgggcttaattcaaagtctaatgctgttttaaagtccagaacaggtaagaaatttaaacagtgctcactttgatttcaatattgtctttgtcataatggtttttccaggcaatgggctggaaaatatgtcagagagtctgttcatactggtcatttgagcatttagagggagttagttttctcttttgaaaacttcctgtcgtattttttgctgcggagtctgggaacctaatttgaaatggcaaaaacaaatagacagaacaaaataaaggtcacaaatcactcaccaaaaaataatctaaagaaaatacaaatgcacacaacacattaatgaaattcatttaaacctagtcaagtgctccttctccaattgttcctcaccttgcacttgcttttttgaccctacagagaattccttttctgcccagttccatagatacctctggactgggtgttctctctcagctctcctctttctactcttattctctttcattctcccccgacgccatttctcttctcccctttccccttcctggttctcttcttttatatttctttctttgtttctctgaatctttcccagttcctgtacccatgtctccttagacatttctaattcaaaggaagaggtaagaagaggcaacatatcagacattcatttctattgtggtgagcataagtttttcttctaactatacagctttctgcagccgactctatatcccccttgaggaatctctagtatgagttgtgattctgtgtatacttggggaatgaaatttgaggtttctagaaataatgcaggtgaatatcacttgatgaaagacaatcactgtttctgtgtgggggctgttgattttgattttaaacaatttacaactagcaggtgttttctgaggaaaacgtaatgtgttgagtgtckattgaatctcttcacaaagcccatttgggtgccatcttctcaatcttcagatgagggacagaggtacaaagaagccacctcacttacccagtctcacatagctaagaagagaagggccaggatttggacctaggaagtctgaccctagagaygagattcatattcaccccactcctctgttcctctgagcagacctccagatcrgtggtgagttgtggctgagtgagagcccagygtggacgctgaccctgtgaacctacctagacccgatccacctccagatcacagcatctctctgagagtacatctgcagacaggcaggrgaggggctctctgtgccaaggtccttttctttttaattatgattttcttttttaaaaaagyatctatttttattttagattgggggggtacatgagcaggtttgttacaggggtatacttgtgtgatgctgaggatcaggtttctgttgatcccatcagccagatgatgaacatagtacccaataggaagtttttagcccttgccccactccctccatccttggggagtttccagtgtctattgttcccatctttatgtctktgtgtagccaagatttagctcacacttataagtaagaacgtgaaatattttgttttctgtttctgcattaatttgcttaggattatggcctctagctgcatccatgttgctgcaaagggcaagatttcattcttttttatggctgtatagcattacacagtktatagctaccacattttctttatccagtccactgctgatgggcacctaggttgattccacgtctttgctattgtaatagtgctgtggggaacatataggtgcatgtgtstttttggtagaasaatttcttttcctttgggtagatatcaagtaatggggttgctgggttgaatggtagttctgtttttggttctttgagaaatcttcatactgctttccacagtggctgaactaatttacattcccaccaacagtgtrtaagtcttcctttttctctgtagcctcatcaacatgttattttttgacttttaataatagtcattctgactggtgtgtgatgatgtctcatagtggttttgactygcatttctctgtgaccagtgatrttgagcatttttttcrtatrtttgttagccacctgtatgtcttcttttgagaagtgtctgcttctgttgcagtcycgtttcacagtggattgtctttatttccctatgcatggtagcacatgyctcttctgtaccattccttcattgcattgcttttcagagtccctttaagattccacatggcatttgatagaggaaaaagtataaaatgtttgaaagtgagaaagagaaaatgaacataaatataagtgcagttttgctcttttaatccatgttggtagagataacactttttctttacagtgatgtgtgagataaatcttctcttttgcaaagtacactttaagctgataaacttacagtttcatgttgtgcactttcctgctaagtcccagttgtacgccacatgaggaggcgaaaatattgttacaggaggcgtgattacacttatttaaaccatagaacaaattttactcaactaccactaaaggaccaattactttaggtcaaattgttagttcacttatgtcttcagaaagatggaaatataaatgatgctaaggatatttagggtagagagtttatgtgtttctattgccttaaaaaaacacctggttattttgttttgctcattgctattatctgaaggcatgttcataagaaataaataatggtggatgggctgtatcacatttttattagatcaaaaratgtttaattytaggcaaatttcttatggtcaaactgtaagtctaatcatttttaaccaatagtctagtcattctctttaacaaytgataaaatggtaattttgtttgcttatttgtacaccaaaaccaaggtctgtcgtgtagctctaacaaattatataaccacagacttgagttgatttatgtagaatttaatttgatggaaattgtgaaccaacttgagatactgataatactgtagtcatgttgttttttwaaaawgcacacttagtattctatacacagctttgtaagtaatttcatcccaataagttaatcctcartttccatcacagttggaacttggtgctgtgacattgtttcttgttttatttttctcctactaaattattaatagagatttttgtcttataaatgagsaacaactaaaaacataattctttatccttttagattgttttaacaaaacttctttattgaaaaaccagaaagaatgaaggtcctatttctcctacttgtgcwggctacaattccagttttctatcatttgtatagattgcctttgtttgtgcaacaagacgtctttgaaaggaagttttaacattaaataataacattctattaattatttgccttataaggcaaacaatagtctacggttgtttcagaaaaatgatatcttcatttttgtataaatttcaattatacattattaacactaatgtacatatggtgaattgaccttcaagatcctatcagtgcatgacctgttattcctatttctgggagtgctataggcagacagccttcagctctgaaccctgtgagggaatgccctggctayagagagctgccttggccaagttcaccttcccctcttccagagtggcccaagtytgatgattcattgtattggtcagggttctccagagaaacagaaccaaagagattttttgtcagatactggcttacataattatggaggatgaaaagttttacaatcttctgtctgcaaattggagacccaagaaaaccagtggtgtagtttgaatgcctcagagccagaggcactgagagcaggagaagatcaatgtcccagctcaagcagtcaggctgagttcattcaaccttggtctacatttttgttccatttaggccctcaatgatcccagcctgcattggagaaggtaatctgctttattcagtccactaattcaagtgctaatcttttctstatttgtttgtttgtttgtttgtttgtttgtttgtttttgagacagagtctcgctctgttgcccaggctggagtgcagtggcgkgatctcggctcactgcaagcyccgcctcccgggttcacgccgttctcctgcctcagcctcccaagtagctgggactacaggtgcctgccactatgcccagctaatttttttttgtatttttagtagagacggggtttcgctgtgttagccaggatggtcttgatctcctgatctcttgatctgcctgccttggcctctcaaagtgctgggattataggcatgagccaccccgcccagccaatcttttctgacacacctagaaataatgtttaaccagctatgtgggcagcatgtggcccagtcaaactgatacataaaatgaatcatcgcactgattgatgtggaggtataatggcctggcctttgtggcctgttttaaagcaactctgaaggccattctagcctcagaacttcttgtggtgtcagcagcctgtcactgggccacagccagctggatttctctgcctggatttctctgcttcccctgagccctgcatcaggtagatgccaagagcaaattttgtgcatttcaaactccttctgaggtttgcttctaggagagtccaacattattatctcaacacattagattccagcctcttaaaaaggtagcacaaatgtttgaatgaaacagaacatgtggttgtttccataacaacttttgcttaacaattggcaccygttaatattttaatagttttaaccattttattaaagagttaaattctaatttcaactcagatattggagccaaatctttactacttatggaatccatttgaaaggagaattaattcttgggggtaggaactgggggatgggagaagaatgtaaataacttttctcattctctcaccttaaaattgccccgatcacattgtaatcaacaatgatgaagagtgaaatctagtcatttcatctattggcacaggcaagtgagcaagtatcacttttcagaatttaggatgtttgataatattacacataaaatggtgaagattcaaaaatatgatctgttgaaaaacctgtgttttagggctgaatgtcaagtatctctcagtgttggtgatgattcttgtctggctatgattattactgttattaacactaataataatatgctacaytggcataggaatttaccctttataattggattctcacagtatacctgagagatagttattatgaacctcattacagagatgaggaaactgagagatgagagacttttcaagattatgtggggccactctcaggtcttctgacaagtctattttctttctcattccaccatctctatgcactagcaaatcaatacatacaagccttttatctctcatatctgtgacacctgaccactcacccacaagtctcagccttctaaaggggtaaaaattctgaaatggcattgtttacaaatttgctcttgtatcaatatgaggaaattctaatgccactctacagatgaatacactaaggcctaggtagtattctaattcatggcaccctaataaaaactattttgggaggcagatcccatttcagtgacaacttcctctgaattgtcatggcccaaatattttttttacttcttttaatgacatctacttttaaacatatatttacatgtagctatttgttcccctacttgatggagaagtctttgaaagcagcactgtctcatttgtatttctctatcctagcagtacctgtcacaagtcttgcatttattcattcaacaaatrtttgttgaagtctatgtaccaaacrcagtgatacrtgttggggtatactgataaatttgaaagacaaggttcaatactcatggatttctaatwgaagaagaaaaagaaaaagaagtaacaaaaaaaagtaaaattaaaattattatgattgctgcagyatgaaagaagtggaagacaagaacctcagaaaagtcttcctgagaacatgcatcaacagaaacaattggaaagtttggagggtagactggctatatgctgaagaactttaagtcacttctataatctgcatagattccaagtattttaattaaactcttatttaggataacagaaggactgtatttatgtagctgtcaattagatttacaagggacaactggcagggttttaaaaaaaaaaagagtctttaaatttgctttatcttatccatcaatcatttgcagtcactaaaccattaagccacaggtatagtcaattgtggatgggtaagatgatggaagaagtccagacttagaggcagacaaatctggctttgaasctggatttcagtatcttgcaagccgttggtacccctgtttctcattttccttatcagaaagatggtcatgatgcaaaccttcaagttctgccattaggaatagagatggtgtcattgagtaaatgagactggaaaggagtgatcatgtrtattgtaaagtatacataaagtgttaaattcaacaaatgatctttaaattattgttaagtaaccagaaggaaaaaaaatacacaggctgcaaggaaactagccaggaaattctagaaaacagycaattataaattccttcatataacattttgcctgtaagtactaagctttaaaaattacagaacagkaacacccctgcagaataggaaagttaaagtcccttaaattgtacacaattagtaatctttcagactgagacatggaagaatagatgtggtggacacattctttgatgaagggcaacttctcttcctcccacccaccccaggaatttaaatcaagacagagtctctttaaaaagtcaagcaatggatgtggagtattgtatggaaaacgtatctttgaggtctgaatctttgaatttcattttattttttaaaccaaattctaacagtatataataacctcttcctcttatgaagtcataggactattttaggggatgacctatttgtcatttatgactgaactgtggtgtatcttatgctgttatctgtgttacctaatttacacccttgtctgacatttcttatgtgtacatattgtcattcaattatatcataactgctgaggactggckgtctttgtctgtagctcctgaaacatagtagaccatgagtgcttatgaacagattagctgtctggtttttgactgatatgaagaaagaaagtgtgaatgggtatcagggttaaggaaataatcccagtcttctaactacaatcatttgagaaataatttatctacactttaataaaatatacacaggcaccaaacagcacaatgccatgtggaacaggttctctacaagcatttgttcagcttaaatagattaatagtccagtgcctctttccaggaaaattcaaactgaccaggttgaaagatatgaggtgaggtgygggaatagcaaaaagtgaaatggatttaagctatgttaaaattcaactcagctaactcagctctttacaaacaaaaatgtttaataggtccatkgtgaataaataaatcaatgaattcagactaaactatgtttggattgcttgtttgcttcttctgaaacagtaataataaaaattttcagaacttaattttttatggctacagagtcagtctcagaatgatactcagcatataacatgtctttaatgggatgcttaagtaatcatggcaatttaattaaaagggcagtcatcttttgaaacagctattgttccctakagagtgttacttcatgttacatttttgcagttacctaatgtttccactcacggaggttggtttgtttgcattttaaataaattatacatagtcttcaacttacctctagacttcattccaaaagttttctcaaaatatttaatcactcctttcctccttctccaaacctgatttttttcagagttctataattcaccttttctattgctgatttaaatattctctctcagtgacctctttgccccacaacacttcaaatacctaacctatcagcccctgacgaaagtattacaattcccttctctctctttagctccagattcactttttcagtttgacattccatgcatactttgaagacaacctgcttccaatcaaaatcattctttcctcctccttatcctcctggatttcccacttgtttaatgataccatcacataactggtcacaaagaccaaatccttggagtcatacttagcggtttcccattgcttccctacttacatcaaatcaatacaaagccccattgattctaactcagagattctgccttagctccagctgctcctccccagcaccagtagcgctggctcagtcatcatttcccactgcctattccaatacctccttgcttggctcattgcctcctgttcatcccacttcaggctgccctctgtatcagcgatcgtcatccatttttcttccgtggagtgcaatgctcatacatgagacatattcctatgsgccactcaaagatcgaagaaatagaaacatttagtgagaaagttaagcatttaattattcatagtcttccacaggccctgcagagccacacacaattggacccttatctccatctcatttttgttgcccactcctctcaccctcattcactgactcccctggccctttcctgccctttcccatgctctcatccttttgatctcaactacattacacaactttagggtggctttccctgagcagtcctcaatctaaattaaattcctttgctcttcctcacagggcttattataatttataattatgtattatttcttcttctgcctcttctgcttctgctttctccttctcctccttccccttcttccccctccttcctcttcctcctcctccctcttcctcctcccctttcttcttcctcctcctcctcctttctcttactcctcctcctccatctcttcctcctcctcctccatctcttcctcctccttccatctgctcctcctccttccatttcctcctccttgtctttctcctcttcctccttcttcctcttcctccttcttcctcttcctctttctcctcctccttctcctgctcttcttctttctcgtctccattctttttctcttcttcttctttctttttagtttgcattaagcctgagttacccacaatatttctgaattctgtgaacttagagaatttcttttattcaccattgtgtccacagcacccacacagtatctagcagatacggggcactcaagaaatatttactgaaggaatgaatcaattatcacaactagtggtagtatatcggtagactagctaactgcaggtagtgacacagcccaatctgtgtattaygggcaattcccacccctgggatgcaaattgtaaggttactaagagtcctgctattacaggcataattttgaatgttctctaacttaaaagaaaaatagttttatatactggcaccagttactcatacatctgctgtacatattaggtccgatcacagcaccctggaaatctgtcatttggctaccagacgtttcttctttgaaagtctacctaaagcataaagctcagcayatatttctcctgctgatgaacctaatggatccccattgttttcaaaataaagtccaagttatttgatgtcttagtctctttgaaatgcataataaattattataggagaccagtgcggtgtggtggcatgtgcagagtaatcccagttactccggaggatgaggtgagcaaatcactggagcctagggctttgaggctacagtgarctatgatctggccactgcactcyagcctgggtgacagagtgacacccccatatctaaaaaataaaaaataaaaattatcatatactggrtggcttaatcaatagtaatttatttttacagttctggaggctgaaggtctgaragcaaggtgccagcrtggycaagagctgatgagggccctcttcctggttcagtgtctttttgctgtgtcctcacatggcagatggtgcaagaaatctctstggagtcttttttataagggyactaatcccattcataaggactccactctcatgacctaatcacctcccaacagtcccatctcctaatactttcacactggggattaagtkttaacatatgaacactcagcctacagaatttggcatgtctaacaaarccrttctcaagytggacctggtcattgtttccaacttcaaacccagccagtctctaccataggccatgatcatgctaggtttttacatactttggcctccaccagacatgttccacttttgtccccatgtggatatatatttgctctttaaaattcagttctctcaagcactttagttactccttcttctgtgttctgattgtattgggtatcctattaattatatactttattatctattccatggtaacttattcaaatgcctatttcccagactaggtggtaactcctggattagactgtgcatttccaatgttgagcccagtgcgtagaatataatggcatccaataacagttggatgactgagtgcattgkcaattgtttggaagtaaaaatgcctttgcctactgaagcaatgctataaatggtgatttaattcttagctgactaaaaaaaaatactgtttataccataatgcagttgaaacctattactaatattgctttctcatctagtttcagaatgttatctctgtttcactgcaactgggggmacctctttcttctcctcctaccccagcccagaggcagagatcttttctatacttttctcttttgtccttcattgcctaagaaggagaggccaaaagaagggttctgtctttttatttgcagtgaaaatgagatggtatttctgccatttcgattttcatagtggcgatgtatgtcaatccaaagttggcatctttggggtttgcctgtgtcttacatagccttgaagaccacttgtctcataagacattgctatgctgatgcatgaggatcttgctgcagttctattagctatacaatgaaattaactttaaaagaagtctaccagtaaataaaagtaacaaaaggactttgctacttaataagggtctcaactataagacatattcatacttttattaattctgtcacttgtcctttggcttatgttgcataaatcaaaagatcccttcttctttccatcttttgactctcatcacacatcttatacaccttggttttcttagctatatccacaaaaataatgtttaaatattgggaaagaaacccatgtctgattaataattgttgtcatttatttggtgaatatattataatgcaaacaaacaattgctcttaataggtgagagtgacacatattttgagaaataatattcatacagaagtatgtgcttttataaagtaggtaattgggtttgctaattaaataaatgctctttctgaatcaccacctcccttcttttttaaataggtggtgtttgcattgctcagtcacagaaaatcccacgtgaaccaagacctggagaatttgaaaaaattatcaaacgcctgctagaaacacctaatgctcgagcagtgattatgtttgccaatgaggatgacatcaggtgctgattacttttcttctgtatgtagggtcagatttgtgtcccatatcctctttctaacatatttcatgttcaacataaaagcttgtaattgccttccaataacagactgccttctagtttgtaaatctgaaatacctacagagtaaaacttggggacyaaatgagataagacaaacraaggtgatagacagaatgatgtgaatgaggttaaggataaggctaattaacatatgttggagttagtctctgctatattgtttttaggagatgataagactcgggcagttagaatgatcgtcttaattgttaaacagtgacctactgagtgtatacaacttcctaaatctggtcttgtaatattcataattgtggtatttttaatacatgtgatatgcattatttatttttattcctgtaggaggatattggaagcagcaaaaaaactaaaccaaagtggscattttctctggattggctcagatagttggggatccaaaatagcacctgtctatcagcaagaggagattgcagaaggggctgtgacaattttgcccaaacgagcatcaattgatggtaagaatgcaccrtagagaatttsttttattccagttggatctgaactcaaaggcaaaactggagtatcataatatgaggaaatgcactcattactgatgacttgatacaaattttagctttggtggcagaattgtcaagaccagtatttaaaccagcatgcatatgcatatatatatatatatatatatatatacacacacacatatatatatacacatatacatatatatatacacatatacatatatatatacacatatacatatatatatacacatatacatatatatatacacatatacctatatatatacacatatacatatatatatgtatatatgtatatagtgtgtgtgtgtgtgtgtgtgtgtgtgtgtatgtatttaggaaagaggacccattatatttttttaagaaaaagaccatagtcagttatttccattatgttagtaattgcactttgagtttgagtttgcgtatttccatgggtatttatggtggttatagcattgttggagggaaatgcttgatttatagaaaatgaatatatatgatgctgggcttatcctatggataaataaatgcaacaggaaagacttggagcatcctgaaaggcagtctatcttctaaacatcttttccagtcggtttgacagtgactgaaattcccatcttaacattatcctctggagtaaggcattatttccagggggtctcccttcaataaagtagttacctgagcaaaccgacacttgagttcatgactccataagatgacattaacatgattgctttattgaattacctgaaaacagaacatataggaaggagaaattttgaagtatgtggaaacacaggaaagtctggaacattgatccatgctaggaaagagaaaagaatgaggcaagtttaagttgggttctaagtattcaggattcagcatgaagtcactggttgctgcctctgggagtagtagagtaggagagggtttaagaaggwcgctgacaccaggctttcctgttgtacttattcatagagccaggtgcttgggtactggtggtggtgtggggggattgtccattgatcctccttgacttttgccataagagaggccttatttatgggctactggctttctctcatttgttatgtgttttgtttttttcttttcatgcagtgatcagaatatartgtccattcgaaagttctgacaatatttaattttgaaagaatattaaaatcatacctttctcctttgaaataggatttgatcgatactttagaagccgaactcttgccaataatcgaagaaatgtgtggtttgcagaattctgggaggagaattttggctgcaagttaggatcacatgggaaaaggaacagtcatataaagaaatgcacaggtaaccactcaaatgtttcctgtggtgcatttatttcattttcatttgttttcattacttgataaattacgtttttctatatggataatgatgaatgtattttctattttttgtgtctttttgttatagtgtctcagggctgagcataccctgatcattcaacaaacttaaatttgtttattggttctttcaatggatcagcaagtttttattgaacatataccatgcatacagtactggggtatctgggaaacatttattgtctactttggaaaatgtactttattaggtttgatggaatacagacaaataagacatggtattgctctccaggggttcaaaatgtaatatgtatcatgrtaagttgctataagacagtatttttcaactattttaatcgctgtcctctataatactattattttcttaaatcctgcatagcagctatcctggaacatgtatgatttttagatgctttactttccatagcttgtgcttaaaaataataatgatattgaatatgcatttttgaatatatgattaaaactatatttattttcagatgattgtgcacatagaaaaaaaactcgcataattttttttttgagacagagttacttagaactgagcagtaaatttagcaaggttacagatatgaggtcaatataaacattcatttttaatatacgtattagaaactaacacatagaaaatgaaatttaaagaatactgcttatagtaggatcaaaaacatacaacatatataagggtcaattttaacaaaaatgcacaaatcctttacactgaaaactacacaacttgaatgtgtgttttagaaatgattcattccttcttctaccctgccacccccagactttgatatgtcctcctttccctcctcctcactttctttggaaatagctgttcaaataaaagatgtaatatactaaaagctagcacagacrtataaacagagacagaacaaggaggtggaaatgggtgccacrctgtggaagaatctgatttcaggcttccatgtgccaggcacttttccaggagctgggttgagtgaagaaaggcaayattsatgctcacgggcttacatttgagtgtggggagatggacactccataataaacataaatgaacagatgtgttcagatgctgagatgtgcttagaagaaatacaacagattaactgtgaaagactaacctgggtattaggaggaggaaggtaattagactgtgtggtcyragtatgcctcgccagaggaggtgacatttgagataagacctgagtgacaagaagtggtcagtcatgtaaagatatgacaggaatgcatgacaagctctagcgccagagtaaggctcttttgttcaaagtaaaggaaaaaaaaaatagttcagggaggttggagcaagagtgaatatcgcgagaggaagcgtgatgacagctgaggctttgatgatagtctggagccagaccatgcacagtcttgaagttctttccagaagttccagagttgmggaatttgggctttattctaccggtaggacacaatgtcttgaggctcttcatctagagaattgctcagacactcggttcaagaagatttgcctggcagaagtgtgargaggattggggttcaggggagaaaatggaggcaggtcaatgaggactcatccagtatcctggggacaggccrtcatggtctaagaagwgctaactaggggccgggcacggtggtgcaaacctgtaatcctagcactttgggaggccgaggtgggcrtattgcctgagctcaggagtttgarwccagcctgggcaacatggtgaaaacccatctctactaaaaatacaaaaaattagcccggcgtggtggcgggcgcctgtagtcccagctacttgggaggctgaggcaggagaattgcttgaacccgggaggtggaggttgcagtgagctgagattgcaccactgcacccagcctgggcgacagagtgagactctatctccaaaaaaacaaaacaaaacaaaacaaacaaacaaaaaaagctagctagggatgtaacacacaggacagacgctttggtacgtagtgttatatttatctaacgctacatagtgttgtgtttatataacaaccagctgagtggttgatgctggggcaaagatcgttaaatcatggaggatgctgatgttaaacctctatcagggaggtctaggaaaatggtgatgtaattagttaacagaggaaatataaaataaatagaatggttaggtgtttgggaataaacttgaattttgttctgagatagccccatgaaactggccagcaggtggcagcataaggtctgggaccccacagasagttcactaaaatttgagattaggaagtcttggagattttgaagttaaagacaaaagcagagatgcaattgccatgggagactgagaaaagatgaggagtgatgactgagaattcaagggcaggaaccaggaaaggacactgagaatgctgggcttgggggaaggagatgaactgggagtcaaggttgtctcagtctccaggagaaagacaggtgcgtgaggtttcagtgctgcagggacttgcagctgagagataagggtgtgcctgggtaaccaaattagaggggttgagagagaacagaatagaagtggaggaarggatgctgtttcaagaagttttgagagaaagaaagtaggtatggtgggagagcttgagaaagaattggagatttctttaggatagggcacatttaagcatgttttcagaaaaaaaaaaaagaagggataactagtgaaagagaataaatgcagagtaggatcttgatggaaactttaaggagaggcattaaagaccaatgttacctttaaatcatgtgatttggttgggggaaaagaaggtacacacaaacatatacgtaatcagagaggaaagttctataattaaatgctaaatttggatatagataattagggaagttcagaaaatgtatgtaagttyacattgtaaaatccaaagctctgtggaggagatgagtgtttgatgacaaggatttgggaaagacatccaagatgagaagaaatggggagtcagcaggacaaaggcatggagtagggtgtgacgtgtaggtgcgtgaacagcagtaaaaaggtccagcttcttggagaggaggatacatgaatggaaaatacaaagtggcagtttatagatgggtttggaaggagagttaagttaagcacttacatgctttccactgagatatattttacactatgcttaactttgagttctgaatgttattgtttgattctctttaaattcatttcctgttatttagactgtattagtgaaaataccccagttaatgaaatggatggactcayacacacacacacacacacacacacacacactgttaaccagtcacataactttttaataggctgttttcagaataaccagtttctccaaactcatattttctttctttttttttttttamactcgtaagtgggagttgaacaatgagaacatatggacacagagaggggaacatcacacagtgggacctgtcagggggttgagggtgaaaggagagtgagaattaggccaaatacctaatgcatgcggggcttaaaacctagatgatgggttgatgggtgcagcaaaccatcatggtacatgtatacctatgtaacaaacctgcacgttctgcacatgcatcccagagcttaaagtacaataaaaaaatcatattttctaagttcagttgaggtatgtagctgttcctttagcatctgtaggtggtatatgactagacttttatttcaggcacaaatactgaactggtttgtggccgaatccagattctgtggcatgtctgcctccaattcctttgatttatttgggtgttgctaaaattataacaatttgtccaattagaactatttctagtgcaatgaaaatggtgtttactccaagtgctagggcaaatgcacccctagggaactgggtcagtaaacagattttcatgcaaattccattgtgggtgataccaaaataacttgtctctgggtggaaaacaaataacactaatttaattttttaaaaaagcaacrtatgacagttttcagatgataagagaagatatttgtctcccaaattaccattttacccagttttcatttctgttttaggggagaagggaagatgatctggcatgttagtggtcaaatgtacttgaaaggaaaaatttacaggatattcacgagtagaggtgtccagcgtttgcaaagtgctttaaaatgtggccttaaaaagtttgcattttaactacctgcaataagtcaaaaagttaaggcactctctgaaagtgagatatccatgaggccctttttgttcattcagaacatcattggtaggttaagttatatgtgttgagtaacattttacattaggcgacggtgatctgcgaacgtaattatttgcttccattgggggcaaaattggcaatgtatttacttggatgagagagtgcttcccagcagggagggacttctgtcttaccagttttccagagatagaacatcttcaagcagtgaggagcatttcttcctgaaatttactcagtagaaacagttttctgagataattttcccctctagaatctcaggaaagctttcaaaaagatgtgatattactgctaacttttgatttgctggccaaattccaagtgaggtaattcctaccatccacttagctatttatgtagttattattgcttctgagagctgctgagttctgaaagctactactacttaatcctacttaaaattccctttgtctttctcgagaagaaaaaaggactcttttatacttgttatcagtggtgrtgggtgttattttatagacttttatctgacctctccctcccttccttcctccctccctcattgtactctcaggcttagtgtctttccactctccaaaacccagacacccacagactctcttgagaattgcatcttcatcctctccctgtctttacacatttttcacacacttatttccccactcagtcctctgccacaattcctctcccttcattgcctcattttttctcattcctatctttcctctgatcagtcccttacttgaccttgttttgtccagcaatgttctcattggcagtagagtctttcttcagaagttttgctttactttttaaatgactgtcattctgatttcttgtcttctatagtgaggacccaatastgaatattgyagagacctgagtatgtgggttaagctgctaaacaaaagccagctccctctggactcaggccgggtcttttccttcctgtctccatcacgaattrtaaatagctctgygcttatcraaacgacatcccttgactgayccagtaaatacagttgattccatatcctatcttaaaaccttcctttgtttcattcatccatccattcattcattattcatttagttgtttatacattttgaagctcmccatgtgccaggcactgtgcttcagatagagagacaaacaacagacctcccttgctctcaaggagctcacaaagacatatacactgtcttgtggaatttgaggtgttttctttgctgggttttaattctcagccaggagactggggcactgctgcttagcctgcatacagctgacactcagatacaaaatagtggtgagcatatgctatgcaaaatggcctattgattcttatttatgatgatagaaatagcggtaatggaaaaagcaacgcacaaatatgtttcttcccacaaacaagcaatcctgtcagtgaaccaaatagcagcctcaataattagctccctggaagacctgtcagtttattttctggtgctagattaactatgtaacttttcaattataactacctctcagcaatcctctgttttgtaaagttatgaaaggtataagctctcccgtattcactcaggacgcatagagaccatatgaaggaagtaggtagtcatcaagggggatgaatttacataatttgatttggtgattcagagtgaaagataacccaggtaggttcccctgaattaaaatgcgttctgccatccccatttgtccccttgcctagagtaaaactcttggggagaatgcctttacgtgagcactaccaggtagccatccatatgctcttgttcttcgcaagtaaaatagcagaaatccaaggatgacttatttatgctgtttctgagatttcatgttgaatttcaatagatccatctgagatgacaaaacaggcattgatttcagacatactagatttcagaatttagagctgggatgtaaaataagaatcaatctcttgttttctagtgaagaaactagaacccagagaagtaaagtgaattattgacaaatcacagtgttaatctcagagctgcagccaggatcctggtttcttttatttggatttgtccttgacatttatatcctccatttattatttacttatattagayattttaccacatagttgaaaaatattttcctgttttgctctttatgatactttatgtgtgatggaatacattttggaattttaatcaccaactataaagtgaagcaaaaataacatattggttattacctaatcctttataaagtagtaaatattttaatattcttcacattgattttcagttatacatgtagtttttgctagtgggtcttgaacagcgtaaacctttacatccagttccctggccccttgccttgtataagagtagacctatgacaacattaagcaaaaaacaaaataggagaaactatcaactagaagtttctataactctaagtccaatgacattgaaktatagcagttcacattgctaaattagagttagtttactcatttattcattctcttaaagaaaaatatctattttaaagcaatatgggaagcactatgtctaacagcatttctagaatgttagcatgcacacaaaccacttaagtaccttgttaacatgcagattttgattttgtaactctggaggtaggcattctgcatttctgatgagttccaggtgacatggatcctggtgagctctagggtatactttgagtaacagagaatattagagttagtttgtaatgataaccatagcacctgaagctaaattagcaaaataaacattcaactgtgctaaaggttactgataaactcaaggtgtcttacagaagatcgtctaaacaagacttgacctatacattgtcaatgcaaaaacatgcaatcagtagccagctttatatacttacttgagtatgtattcaaatcagtaaagtataataacagagtaatatgtatatatgtgtgtgtgtgcgtgtttttctcattagtaaatttgaaagtgggaagcttaattactaaattactaaatttaaagaaacgtacacagatgcacctgtatcttcaaagtctgcaaagcagattgtaaagtttgccatctcagaaacaaaaaatattctgaacacttagaaaactgtactgtcaatcgtaaatacacatagagtggaggagttgaagaggtccttagagattatttagctcagtttcctcactttgcagaaagggaaattgaggctcatctggtcaagttggttgtctaaagccctgtagctacctaacgatgataggactgaagtctgatttgatacttgcttctttccttcatcctttcctgctctgaagaactttaccgaagtggggctgagttgcactgacccattctactatttttcctggtatatgggccagtatgttttttttcttggccacctaaggtgaagtattccctctttgtgaascgcctgacttctgagggagtcagattgatgcatttggtctgagaaactaacatttttagaagggaagcaattctagttaaaatttcgagtaygtaaatactcacattttttcagaaaataatttaaaacagaaaaatgctcacactacagagagaaaaaatgaattcaggagtctaggaaatcctttctgcaaaacccacaacagaagctggcattatcttgattgattggaagatgaatgtatctgaataaacacaatctctggaatattacactgaagaactcacaaatggaaaagagtatataggcaaacaggtgacagttcagcatttttgatcaccaattatttgaaaaactatggtaaggcttgggccagagaggatgagaaagtttagaaaaatacagaaacattaggataaattgtcttcctttaaatggctattaaacttcagttgagggaaccaattcattaaaaccaaacaaacttttaaaaaggaacaatgtatagatgattcaatatcaggaaaacttgatttctcctcttttctaaaagtgatacaaagcagataaatacaggagactatatttcaaaaataatatttcttctctatgttttatcttgggattctttttaactcagaggatttgagagagtctcatagatatgatttgctgaaatacaagagaattaccacaacttcttaggaacatagctaaacaaaagaactagctgaacaaaggattggatacagtagggcaaaggagacataaagtgtgattagagcttactaaggctaattgagaaattaagactaagtgtgattagagcttactaaggctaattgagaaatcaagactaccgaagagtcttgatttttttttattacttatgacatttgttaaactctatattgtgctaaacatctgccctcaaggagcttatattttgtgaggaagataatagtcagacaatagtttgtaagttgctagtaagcagggtctgtatcctcaggacttagcatatgcttagcattatatatctgttaagttaattaattggtctataatgtatggccagatagtcctcctgttcttcattacagtgatgtagatatgatgcatggtgcctagcttggcatgcatttgataaatattttaattgttggaatgatattttttaataaaaggaaaagctcaacatagttataaaagggcttttactgtaatttaagaagaaaatgtactattctgatagtttgtctttaaattcctgactscgatgctaatttaaatgggaatatgattctagaaacacatatagtcctgtgtcctataaaatcagtcaaattttattggartatttggttacctgaatatttaactggaatatttggttacctgaatatttaattggaatatttgrttacttcattataaatgccatgactccatagtgttttgtttttctaaaaaaataaaattacatttatactatttgaggggaaagcactttatttccayactacctctaatgaggtaacagaataatgaaaagacaacttggagtacatartggaaaatgtcwtytaaaaaggtttcatttatacaattttaaaaatgtaaaaagttcatgtcctttgcccacttttgatggggttgtttttttcttgtaaatttgtttgaacagacacttctcaaaagaagacatttatgcagccaaaaaacacatgaaaaaatgctcaccatcactggccatcagagaaatgcaaatcaaaaccacaatgagataacatctcacaccagttagaatggcagtcattaaaaagtcaggaaacaacaggtgctggagaggatgtggagaaataggaacacttttacactgttggtggractgtaaactacttcaaccattgtggaagtcagtgtggtgattcctcagggatctagaactagaaataccatttgacccagccawcccattactgggtatatacccaaaggactataaatcatgctgctgtaaagacacacrcacatgtatgtttattgaggcactattcacaatagcaaagacttggaaccaacccaaatgtccaacaatgatagactggattaagaaaatgtggcacatatacaccatggaatactatgcagccataaaaaatgatgagttcatgtcctttgtagggacatggatgaaattggaaatcatcattctcagtaaactattgcaggaacaaaaaaccaaacaccgcgtgttctcactcataggtgggaattgaacaatgagaacacatggacacaggaaggggaacatcacactctggggaccgttgtggggtttggggagggatagcattaggagatatacctaatgctaaatgacgagttaatgggtgcagcacaccagcatggcacatgtatacatatgtaaataacctgcacattgtgcacatgtaccctgaaacttaaagtataataataataaaatttaaaaagtaaaaataaaaatgtaaaaagttatwcaaatattaaaactatatttatttatacaatttaagcattttytaaaaaattattagtttattagggttttttttttttttttttttttttaccctgcaagaacatgagcttcatataggaagagattttgtttcattcacagctgaatctcagtgccttgggtggcatctggcacaaayaggcttccttaaaatatttgtggattaaatgaaagaattaaattcagcttattttctgctctttttcaagcactagctattaratgtcaaggacatgttcgtgagcaaaacaaaaatggttattgtcctcatggggcttacagtctaattgggaaggtgaataatttagcmcagttcctgcaatgcaatgtgttaagcgaatagccagcatatagcagggagaactgatgtagcctargggmgaagatkggtgtcattgaagttgagactaaaatatgagcagaattaagaaaaagagattatcagtagtaktattrttttaaccagagggtggcacaaagascagtgggcaagagaaagkatggcagttgtagagactaggagagggggatagkargagagtaaggatagagacctaggyaagggacagatcatataasactttatatgystcaagaggcagttgaaaaatgttttgaaagtcaatgaatgggcaccagaaggtwttaagcagaataatagaatcaccatcttagaaagattattctggctgtagtatggataatgtattggtgaggcataacactggaggaagggagacccatgagatactacagtaattttccagaaatgatagtggcccagcctrtgatggttgcactgtactaggaayggacagaagtagatsgayatattaataaaaagacattttagggatatatgtagggcttggcaattaattgcatgttaaaggagaggacaaatcatggatgatgccttgattcttggaatgggaaattcggtcattgattgaaagagcattcctgatataatgaatgattggggaagagggggaaggaggatgatgaattttgtgggagatactgagtttaaggatcctrtgagatatagagctgcagatgtctgggaagggttasttggttatgtgagtctgaagctaagaatacaaggtcttgctgagacagagaattggggcctcactagtatattaatgggacttggtgagacagatycagaaagtatgtggrgtggaaattgcagagggcctgagatagagccttgaggactcagaaatrtgttgaaggagaggaccctgscattccagtttctstagaaatygttttcmctgtccataagtggagcccctcyggccatgtytctattctacaacsctgatcctctccytkgtgtctcttcagccacaactgattgatttaacactgagctcttcactaaagctaaattatcagagtccttccgagtaatatctaaaatgggagtgaaaggaggargatyattctctctcagggggtgggaggcagtagtttgaggctgtgagatatgaggctgggaagtttccaccacaagggggaagctgacctggaagaataataytgacttgtgcaacagaataaaggtgrcagatggaaagagttctgatggtgatgaggaccttaaccaggcttttcytgtagatatgtgagatagttcaaggttctcctaattatgttttcccatttttagctagcaacctagagtccagactartacattawaataatasttgcctcatagagcggttgggaagttaaaggaaataatatgcataaagattattgcctgctacatagggaatataacagatactgttgcytactgatttaacaacttccttttctttgaagccagcackrtctratagaactttctgaggtgaagaagrtttttccatatctgcattgtttaatagagcagccattagtgacatgtggctattggtcacttgatggaatatggctagtgcaaactgaaaaaatwgaatttcaaattgtatttaactttaattactttacacttaaatgtaaatgtaactttgatttctttacatttaaatgtggctaatgactatcatattggacagcagaagtctagggtgatagacctawagaacaacaatttttaaagccattttggatyggattttctatcatttgcagctgcaagcatcctaactaatacwatgtattaaatatargtggaaatgatttatttaacatggcatgagcatccctcattttaagatattamagaattaaatttttgtttttatatagaaattctgaattaagtcagaaggtcaatrtttgcmatayacacaaattattaaactaatttctcacaggtttcctaagtaccagcttctcagtcagtgaatataaaatgtgatttgatttattaaaattaaaatgatatacagcttttcaacaacatttcattcagatatatttctacataagttgcagaattataaaacacacatattagagattgtccctaactttatcaaaacaattctcctttgggttcctttaacaacatgccctctagtctaccaaaatattattttacagatggtgggggtgtgctacttgcaacccagatagacaataattcagctaagcatttttctttgcagtaagtgaaaatctgttcaaagtgctggaagttttatcaactggaccataagacccaagaggaactaagtgtttctgttatgctttctgtgtttamtaattcccagccttgttagtagacactcaaacactgcatcctagctgtggaatcttgggtgggtaacatagtctctgagaaattttgataaatgcttattttccgcatttttagattttggtggtgagagtggtggttgcaacctttatgcctgtctttcacaaaggtcactcaaattgctctggtttctttttatgttaccaaaacgctctatagctaaactattgagcttaaatgtcaaacttgcattatgtttagaaatgggtacttatctctttatgcacctttcccttacaccccaacggtgggccgacatagratatggtagaggagttagtattctgacaaataggtgatgtcattccacccatgtatcactttccattaaatctttgacccatatataacctttagctgcaggcttgtttgcttacatcactgtgatcaaatggttagaattrtagattttcatttgggaaaatgattattattttttattaaggacattattgctggtttgaattatccttttgttcatggttcatgcacaacaaagctttccctagcccttctgtgggaggtggaaagatgctctgcacctgtctcctacccagatctctttcagaaagaaaatagacagtgctagctaagctgttggatgggagcaatattcagttctttgccaacagagatcctagactccrgataygccaattcagcaaaccacagggagattatctaaaactgaaaaggggctcaagaatccatcagaatatgagataatttaaataaaatttaaatcctactggccaacagagaaccagaggacattagagaaggaaggaaacttggaggtcatcctgttcgatattttgctgagtgtcacctgtcaggctgatgtaaaatgaggacagggagtacatagaaacatttcggtttytctgattcagtagtactcttgaaggcctttattggtggtgcaaaatgaggctttctcattgactctaaataggcttattagcagcacgcagaaggatttccactgtgaycttttctttgtccctagtcagagtgaaggcataggtctgaagcaggctgatagctttggaagtgaaaagtactggcaggctgagggcacagaatgggctggctgccagtgttgggtycagcaccctgaggagtgtcatttgtcagagccacttttatgaaacagaagccctcttttgtgtatttgtacctgtgaaagggagcagtggtatagctgatccaaagtagcagaaaaacaaataattcatattgactyaggatgctcacctaccccctcttttgcaggagtgttagtttgcatgtcaatacatggacagcctccttggattctggcatgatgctttccataggggtttcattaattggtgcaaaagtttatttcagtagagtccaggaaactgttagctttttgttctctgcctaatgacagaaaatgtccctgtgactgatttctttgtgggaccagtctgcatcattcctaagactgacacaaagccccgcttgagtgtgtgggatgaacggcatgactcacacgttcccctggagaactgcaggtttgattaaatgtttaaatgaccttttaggacagatgattatgaggatgggcaaacaatttgttctttcaattcttaataacttcagtgtgtattgcgagggggaggtatatgtagacagtttggaggagtgtgaacaagagacttgggtaatcactggagataagggtgatgatgatgataatttgatataaataagcagagagtaagatttgtcaaaaaggggcaaactcattgctgttctcamtatctcccttctttcacttcaagcacagacactcacaacatgttctgtttctgataacttcctaagcacacaggaactccaggatttctcaaggaccacagccctgtggccaaaaatctttttccttgactgctctctgggcagctcagtagtatctttaacatggcaaatataaagatagtagattcactacaaagacacctygagaaaaatactgcctgcatttgtaaaccatacacagtcttattattcaatttgtctttatggaagctatcagttagctacacgtttcctttcctatgtctgatgtacctatctctagttgattctttctctctaactctacttcttgaaacactctctgctggtttgattttcaggtgcattcatcctcttttcagattccagaatgaaaacttcctttttgagacacccagatagattacctcttccttagtccacctggcccttatccacgtcccttgaatgagttttctttgtctggacacatttctgaagtaatacttctctgcactcccaaaatacagctcttccttctttcggccttttgctgtgttctattacattatttcattgccactcagaataagcactagatagacatctaaggtttaactttacattttatatattttattatatcaaaaactggtcacatataaactgtagtacttgggaattgagggtatttcttgagtattacaagaaagtattactttcttgagaagatattactcaaaaatatatacattttggataaagaaattttgacagtataagatgaattagcaatgatgtttttcagaaaacacgtaggcagtaacttcatttatatgaccatgttattaatctgtagrcattaatggatttatgtagcctgttcagaaattaatgaagcctgttttctatggattttgttattagctccttccctcttcttttgtcttcttggcatcactgttgacatcactgatgggaatcccactactgcagccattgcaagtgtttttggtgattattgttcacttaggcacctttgtgcactagatctctgatcaaattattttgaaattttaatatgaaatacataggagaaaaaattgaaaatgtgtagcrgtaggmaagcttttctttgttaaaaaagtgtaatttaatagagtaagaggtgtgaaatatgtcaggaattttrctaacatgaaatttcatcatttgtccagttgtgtacttaatggattcatcttaagtataccgtaattcctggcaataatgtggggaagctcagatttacttttcagtgcatgttagtatgtaaaatgaccccyatcttcaatatctctatgttttaacacctgctktgtttttacaatagagscccttgtttggaacaaagccacttaagctgaacrtcattgtacctgcacagttacctgggttatctgtggttgtgatgaaaattacaccaccataatcaccccaggctacttacaaggcaccttcatagaaattatactgtgccaagtgccacaaagaatatcaaaatgcagcccctgcttcaggcrcttatgtttccaaggggaaaaaaactggcctttggatttagataagaaactttattgtgattacaaattggatttcctgtttttatttcaggaaagttatatttgaaggtagaagatagctagaattgccatttatctcacccctggagggtttgaaaccattcttgaatgagtaaatgtattcaaaaatttaaaattaaatcagatttgttatatggaatcatttaaacctaatttcttaattaaagacattttaagttcactttctgttccttaggtgtaaacatctcawgctacaaaaaacaagaatagattccactgctggggtgaaaagccacgrcttttcttcctgtgttctgtttcccaggcctatcaaagatatttaagtactgagttaggtctggctagggaactctcctgactgctttaggggcacagatgatagggaagaaaagagtagacygtgggggttagtcttggaatgatttcagtactcccctttgatggtgatagctgcttcctgttaggaacttctgttggaagcatacttcttacctgaagaaagttctgggttgagacagttctaccttgacttatttaccaaggctyctaaaccatatagcacatcactatgaatacactcagggtgggggcaatrgatcctacccagatccctgtaaagccagcgtggttctgcaaccatcattcayggataaggaccaagactgagctgctctggttgaagaagctgttggatgatayggggtttgtgccasagtgtggtgaattcattttccawgatatgctgggctcactctcagcaaggccagctgaaagctgagtctgctttggatgcagaggtaygtagtcagtggctgtgcacaggacrggactttgggatgtacagrrggatataytatccttacaaatacttccttcasctgtttgcygatgagcaagaytccaggaataggatacraggcccctaacttgtcttaactctctgattaggtcagatctccctactgtatgcccatagtgcaccatactcattttagcttttattacagttacagttgtacatttatttgtggggttgtttgatgcatatttatctcttattaaattgtaagctccatgaagataaggagcatatctttttgcttatctttgtggccactgtgcctgtcacatagaaggcactggataatcctttgttaaatgaataactagacctaaaaaatacttcaaggtaggtgatgcagtcattaagttcacactacaatgaaagacagttcttcccaacaggacattatatgttttttctgctatcatttctatttgctaaattgactttgagtttgagaaattgggctatgatgcaatatgtgcataaaatcttcaacaaatactgtgttccatttttttaaagcaaggataaggatgaaaaaaataaaaagatgaaagagtttatttaagctactgatatccatttgttggttgaaaaaatatgtggctgtttgcattttgtttagccacagaactcccatataaacatttctatctttgacaaaggtttatgcaattgatctggctgctcatttttcccccgtgatttcctttttttaattcayaggtgaatgacatttagttctcggttgtggaaaatgctcttaatgcctccatcttttaaggagatgttcctatagctcagttactttgaatatagttttttgttttstttttaatttatgrcatcagcaaatgatttacaccatagtgttaaccagtgctcatgaggatgctgattttagcagaatcctagggaactaatagaaaaaaatcacagctaattttagtatttgtagggccttatgacagatagatcygaatactattattcacccttaataacttcttgctaaattatctgttttgtctcctgtctaattttatttctttcatgaatacacatattttatacatctgatatttcagaaaatgtgctwaaaaatgtctayttttccatttctycattgattatcagtttatctaatctgtgtatcatccatctctaaacctaatttttggatacatatacaaccaatasacrtgggatataccaacaatrtaattgcatgatagtcttagttaaaaagtttagtctgtctctgtgaatttgattcttctgctttgcatgattctggctgagtcctttcatctggtgctggtttttgaatacatattaggttgcttccaatccatctgaaatgcagtctcatgagaacataggtctgcaatctaaaaaaaatactttgattattcttgrtacataaaacaatagctatttttatagagttagaaggaatattagagattatttatcttatatcccttttttacagattgaaaagctgtaatcaatttgagtaagtaacttacaaaagggacaaagaaaagaaccagaatgagaaattccatatgtcttcttatcatacaattcaatcctgtgaattgttgattatttgctttactactctaaatgacttatgcatgtcrttttatttgtctttctagcatcaaaatagaagaaggcctatttcttcttcttctaccagttgcatagttaaaatgaggctgaacattctcttgtaaattcagggtgtttacctagcccaggaaaatcaggcctaagcagacaaaagagacttggaatgatttatctaaacacctaaattagttacatcattatttatctgcgaagcttctygagttttgttrtcatactctggatggaggccaatcagaaatgacccttaagatctgactctgtctagccagtctccccttgaccaaggagaacatytgggcatgaactgtagttttcattgtcctctgaccaactcagaaayagctacctgaggccagcctttagttctattttgatcaaactgtcttatagacacagccttcagccttcccyrtgacctttgaaaactgccccagggtaaaggcraattacaaatactattaaggttgatgagtaatcaactcagtaatgaggatactatttcacattcttaggggtagatgctttttctctgtgggatgcctgagtaggaaattttgatggctccaaatgtggccacaacaaacatcaggaggctctsctattgtagagatttccctgaaactgaactctggaggatgaaacatttggtgtagatacttgaccttctraaaataaagcttkatgtatgtgtgtatctatctatttttctcatagcagcaattagtctgaaatctaatgccttgtcagtgaacataacaatttttgtaaatgttctcctcttagcttttaagttttttttagcgatgagtcaaattatactcaggtttttataggttatccctagtattcttgtttcttgttattgaagatattcaaatgttaatatattgtaataagaagtagctcaaaaagagcagaatgacctcttccttacccccttagtgatacagacaaatagagtatttgttcatgttatattttggcttttattkttaaatcaaggaggttgaattagagacagagcaaaataagcaaaaacctgaagctataaatttctaggtcaatccaaatacataaarcattaaaaaatgtcagatgcgaagctagatgcaaactgacagggaaaaaaaaaacctgtttgtgtacttaaagccccaaaccaaaagcaaaattaaaatttgtgctgacccttctcccttggggctgcagatgtcactgctgtccagggcrccgtctgttactgagtggaaggaagaggaatggcatccaagtcactagtgtaagataaaattgtctgcctgccaaatcctgaagatgtcctgccatatttgttaaggccaggggatggagkktagaggtcagcaacaaaggtgaccattaacactcattgattcttgtcttttatgactcattcttttattattacatgttttgtaagaggttttatacttatacatatataatttttatttagtcagtcacagcagtagttacaattyatttagcacttatgggacaagatattttatacacaktttttcaytggatgtccaggactattatacaaactgagtattactcttatattaaaggtaaggaaatagcttctaactaagcaaagttgctcaaagtgrcacatagagtgaggtctgyggctgttctcttactccaaatgtgggrtatctcagaaattgccatcctccagaaggctacagwstagctcagactgtgcaaattgttctccatttgccatgcccccatgcactcaacactattccatgtcttccstgtgctctgsgaagctgacccttgtcatttgcatgactgggactctctgctctctgtgtttatcttgggtggggcctatggaaggctctagcaggatattggagggcaggaagagaaagaggtcaggatatttcttcttcakgtcctacttcggtcctgtgcgctggccgtgatcaygtcctttcaggatataactcccttcaccctgttctcctctgtacctcttctgatgcagggctyctaaggaaacactgctccttttccttgactgtttatccctaagggtagtattatattctcaccattgctatcctttgggtgccctgccatcttgtttgctccttaagtctgtctacaatttatgcaaataactcctttattaaaatctctttatttgaacactctgggatgaattctrtttttttttctgggaccctgactaatacagaggccatatgaaaatatatcaaagataattttcaaagcatgtttgaaagctctacattaggatcactagcactagcatgccaaaaggcacagawaagaaaatacagggcatagcaaaatattgtttcttcttaatagggaatctgcctcagggaaagactaggctggtgagaagggggaaagactttaagagtcttatagaccaggcattagagaattgtgataggtttttgagcctgtgataaaagctgtgtttggggaagatttttctagcaaccatttgtaggarcagtggaattaggaaaaaagggtgacagtaaggagaacagttaaaaggcttttaaaataagccagtgtaaagtgattggaggcaagttcacaaagtggcaacaagtatgaaaaataaggaatgaaataaatagtgaaagaaacattattactattggaatttgcattcttgcycatgtgatgcayttgctttaaattggtgtaagctcttcacatgcagagggcccatrtgccttgatgtaacattagatcaagtggcagaagctaaatttggaattaaggcaatatttgrttgtagrgaacatcattctcrtttctagctcttggactttatgtggaagcactttaagtcctaagaggctaattttagttcaatctatttagttaacaatatttcagatccttaatttttagtttccagatgatcagactcctcagcttgaaatccaagggcattatagacttcaagcaaattgcatrtgcattaagactgttgaacttgggayaagtaatcctataaaagcgaaatcattgctgaagcatttttgtaatcatgtattcctcctgcatgttcatttgaaaatgttctcttttggtgtggaggcacatgagctgattatattgagctccatccaccaatttatttattcatctaataaacattttaatgaatgggtatcaggcacgtttrtgttttacccaagagacttatttaacagtcattcaaccatttggtcattaatagtgaaaaggtcayaggctttggcatgaggsaggcctgggtttgaaacagatcttcaccatttcctagaaaggttgtcttaaggcaaattatttttttagacaccttttcagtttttctgttaaaggaaaaaattgtttgtaaagactgcattgtgactgagaaagggcacgcaaactagatgagtttaatcctcctatctctcacccctgactaaccttatatgtctacacaaatatgcaatgctccaagttggatgtgaaacaaatggtagtataatactcgcccttaaatataatttcagatagccacaaaatataaaaccatttamggatgtgaaaaaattagtataataaagaagaaaatacagtataactttttcttctgttatttaactggtgtaaaattaattccttgactctcatattttgtaaacaaatatgataatgtatgtggtgatrtacggctttgccttgagaaggaaaaaatatagccataaaatatttaagaaaattctggaaataagggtaatagaattaattttttcaaacatttcccaaatgtgttttaaatggctttcctgaaggagaaagagagagggagagaaaaaagagaacatttagatataattacagawaagacctatgcataatattagtggacttaaaaataatcatgcatattcatagctaaattgctaattaacattctcagaattttgcttaatgtaagcaagttatcctaatagggttagggcaaaaacaatatgmtaaagattgaaatatgtggctatttaaaagcactgaaaacttgaataaattgcctcttcccctcccttagacataaaccattaagcctcatcatgttttttttttttcttcctccctgccccctcccccgaccccaccccaagacagagtctcactactctgtggcccaggctggagtgcaatggcgccgtcttggctcactgcaacctccaccttctgagttcaagcaattctcctgcctcagcctcccgagtagctgagattacaggggcccgccactgtgcctggctaatttttgtatttttagtagagacggggtttccccatattgggcaggctggtctcgaactcctgacctcaggtgatcgacctgcctccacctcccaaagtgctgggattacaggcgtgagccaccgtgcccggcctcatcatgttttttaaacaataaaaagggcaagttttagaagacagtatctcaaggctgggtgcagtggctcatgcctgtaatcccagcactttgggaggccaaaatgggtggataatttgaggtcaggagttcgggaacagcctgaccaacatggkgaaaccctatcccatctctgctaaaagcacaaataaattagccaggcatgatggcrggtgcccataatcccagctatttgggaggctgaggctggagaatcgcttgaacccgggaagtggaggttgcagtgagctgagacggtgccactgcactccagcctgtgcgacagagcaagactctgtctcaaaaaaaaaaaaaaaaaagaagaagamgacgatatattaagatacaacaactctttaagcctttgctgattgttgatgagttttaaactcacagaaggttttgaagaaaggctggcagaacttgaaggcagaacacacaggctgaagtcctgtctatgcctgttactaaatagcaatgtgagcttctggaggactctgaactctctcagcctctgtgaaatggagataacatttcctatggagctgcctcagagatgttggggaaatcatatggaaatcaagtatggctgtcaacaagttttgtgaattgtaaatgaccataagcatataaagtattagtcatctattcactcattcacaaatggagcatgcctagcgttaggtggtgggrctgtggggtggtcattaacatggtgaatgagatctcaagaagcagtgtgttcccctgggtaagggcatgggctttggagttaaacccacctagagtaattcagggctcatcactccgtgacctcctgtcctgagaccttaatttgtccaatgtttcatcattgtaaatcccagtttctttaacgtgaatatgaaaaaacatcatatatttcacaggggagttatgaggatgtgagaagtatgatcaagcacttaacttctcatgttcaaagtgctcaatgacagttggcaactatcaatcaactcttcaaagattatatctctgatcaaggaaagcaggcatttgcaccaataatgacagaacaaaacaacatggggragagyagtagtataaacaactttgagagttcataggtgggctgccatactttcagctagagtgataagtaaagactttggagacaggtaaatattaagaataaatcttgaagaacragtcatayctsaataggaagagatatgrttggtggacmgcatttyaggtagacagagaatagaatgagctaaagtgtagagatgagaaatttgagtastccagttgtctagactagcactgtcyratagaacttwtgtccatgaaggcaatgttgtatgaacgttctgtccaatatggtagccactagtggctgttgaacacttgacatgtggatagtgtgactgasgagttgaaktttttattctatttaattttaattagtatacattttaaaaccacatctgacragtgccagctcaaaycrtaggatacatggagaggtgtttagtgtgataagwtccaaacagattggcaaactttgaagaactttactgctaggccaacamgtttagattccaaaatagaacaaacatatttagaagcaggcaaaacaaaagaatacgtttatgaaggagaccaaaaagttgcagagagagaaagaggaaggccaggaatccaacaaggaatgggcattgaagaaaggcttgtctcatactgttagttagaagccaatgggtatgggaaaaaaatttgttagatttggtaattcagagcttctttgtgactttgagaaaaaaagtttgccctgagtagtagaggtgaaaagaatattgcaggaaattaggagtaaggtatgctgaatagaggcaacatggaacagccttttttttttttaaagagtttgtattcctagagttataggataaagcattacacagtaagttagtctcagcaagtactgtatatttcccaagtaagtggagttcttgcaggcaaactaggtagtttcaatgccaggtgtgaaattttagtggtttagataaaattttgaagcaattctacgaataagtactctgagtcatgacatttttaggccacattgaaaacgctagctgaaagaatacaaacaatgttgaaatcatatctaagtcccttgctgagtttatattctgagctaaggatagattagcctcatgcccttatatgacgaaaaactgttttgtttttcttgcacagcacagttaggtatcagataaagggggaggagtatcctcatggatacctcaaaaacaagtaacccgtagacagaggacagagaaatttcatgcaaagacagattttcctatccrttatgattaaattytctcagtttcctcattatgaaaatcatttgggatacttgatmaatgtacagaatcttctgcctcaattcatactggtcaatataaatcttagcttggggatctgaatttttaattagcacctgagcgattcttagtatcaggcaattttaggaaatgtttatttattcatcctttcaacaaacaccaatggagcgttttttccatattgcagacattcagatactaggccacaagataattaagacatggtttctagcctcaagaaattgttctgggagaggagacagtaaatgccatgtaagaaatggcttggcagctgttgcaaaaggagcacagagaagggcagctcagcattgaggagatcatggaaagctgtgcttggggaaggtaaagtttgagtaggatattcaaggataagccaaccagatatacagggagtgtgagagaaaagcactcttttcaggataaacrtcacattaaagacaagaagagattgtgttgggtctatgaatactactgaattcgacacagctggaaaacaggttttccatgagataatggcctgtgtggcaacagacaaaggcatttttgtaccagagcacaaaaataagwgcctagttattttcaaggtaatgtgaaatcattaaagggtaatctgggrttggtgagattggagatagggagacccattaaaaacttaatacattaattcaggtgagargtgatggtgtctgacctaaggcaataaccacagaggtagaatggaaagaacagtttttgataaatagttggtgmtttrttgtgtatgacataattagacgatagttcttttgatccttttattaatattgtctcaatgaaatgaactgaattgctgaataattgattttgtagatggctcacaagatacatttagccrtgatggggaacatataattgtttgctattcatacctatggtgacttcttaaattggattgctattggacaagattttcagtatttatcccattgatttaaggagacaccaatgcggaggatggtctaagaggttttcacagtcccttctgtgggtatcccaaactctttgatattatataggtgaggaagtatgtattgcttactacctatttaagttcttcctagtattctggccctttracmgtttattctgtttgtttttttttttccttctttgattacttacagttgtaataccttttaaagacatttgatatctcttccttgacttattccacattcaagttaatatatagaatatgtatatttacaaaatatgttaactaaatgaattatttttgaattattttgagactttctaaattagtttgaagtatcttgagttgtcatgaaactaactttgaaaggtgctgatttatagtgacaatatttgtggccatgcaagaaaagaggcactggacattttaataagcagtttaatagaatttaaatatatgacatccaattactgacagaatacaaagcatcataaagtatgctttgcagacatattttataaattggaaamccttaaggattcatagcatttgtgtaaaaagtgtggtcatttacacattttaatacattgattctattgtggaaggtcctgcaacatggactgttaaacaattaaaatggtcaaatgtacttccatgtttatgtaatttgcattcataggaagaaaatgggcaatgcagaaggaacattggcctagagaagcttactgaagcaagggaatttggagtgagacagacatggtttgggattctgactcttctagctttgtgaaccttaatgaataggttcacctcccatagcttccctttcctcaattgtaatatgggaataaaaatgcttacttacagggtcrtgttgaggattaaatgagataatgaaagtaaaatgtcagtatggcatctgagtcatggtatgcccagtggaaaartaacagccatcattattatttaaaaaaatcaggattaaagattctagttgcagtccaggtacaaattcatgatgatctggaacaagtcacagtttctgtcaggatctgagcctcttcgtttgtaaaatgaagctagtagactggatgaattccatatttgatgactgaaattaggattcaatgacttatataagtcacatctgaacttgtgtcagaaaatttattatttaaaaagttttattttaccccagtcatgcacctcctttataatcattgagaatgcatttaatccaaaatgatttagaggctgcaggaatgttgattctgaaagcatgatgggtatccaggtgaagaattccatcaggcagttagagaagaaactcaggaaagagggcaaagctaaaaaacatgggaatttgacaacacaaatgatatttaaagaatgaaagtgactaacacttcttcagaaacaaaaatgtatgcaggcaaattttacatttatatatatttttcctaatattcatggcaggggtaacccattaagaataacactacttactaattctaaaatatttacaaaatattgacttagaatataaaatttaaaaaacaattgaatgtccacataattctgtcataattagcagactttttatgcattcgggataggtgaggccaattactttttgagatcatggatgcattttctatctgtctcagcccaataggttgccatgttgagagcctgaacatagaatatggctcaagacaaagaaaactctagaaaaggtaaagccaggtacttagagattcacatttttggcttattcaccctcaattacatccagttaatttgaactaatgatattttctgcttattctcctctacatgtgctcattcttgagaggttgtataggatagggattggtcrtttgattttggagctagatttcctgggttcaggtaactttagggaagttattttactctctgaatggtaggttacacaggcaggaattaatattagtacctactatcttaagggtgtgtgagagttaaaytagataatatagatatggaacacgtaggccaaaatctgatacacagtttataagcatcaaccgttttttccttcagttattaaaataagtttcgcttctctcaagcctaaattttaaaaagttctttagttttaagggaaactaatatgcttggtggatttggtcatgttcggaatagaaaaaaattgcaatgaatatggttgtttttgaattgacctgtcaatttcatcagaaagccacattgaatgtactgtgcagacacaagttaagttgaaaagtgctccccaatgaaagttatcaaaggtgaagcaatagtaacacattccagaagaggaaaaatgcatctttaaaactgtatgtgtgtgtatgtatgygcaggtgtgtgttttaaactggagtagagagtatgaacacctagcataatactgggaatttgctaaattctttttattaatataaaataaatgttatttataagttgagtgctttgtaattgtgtttataggaaaaaaagacatttcacaaaagttatcttctttttcttactctgaaactatgacatatgcctgatggatatagattttcattttaaaaattaaagagcggctcaaatgagtttattttcttcgatgatgaaatgctgcccggaggtggaccaagaggagtgataaatctttgatgcacctgtgtaatatatgcagtacactgctgagagtatctggttttgaggtttcagtggcagaacaccaactgcagggaatctggatattctagcatagttctgaccttaaatgtattatctactgaaaagaataatgcacagtttcaaaaatgttaacatggtctcaaaagaaggtgagtgttattttccatactttaaaaacactgtaccaaacagcttaaagtgctagtgtccctttaactttaaaatagaggcttcatttatttygatgactgctatttagggtaccctaaacaacrtcttagtagcggaaagaattaatactcctaatattccttttggtggtgggaagtggcctctgggtaagacaaagaggtctgggctgatgacacaatggaatgtgaatggctttttccctatggttctaagcatgtgtcctccagcttctcaaacgttcttagcacttcagaatgaagaggaaatggggaaaggttaggaaagcagaaaataagagatagggcagaacagccctttgaagagtttgctcatcctcaaaaataaagacatagagttgaagttctcctgagaacagcagagtcccttcccttccttccatcctatgcacatgcaaagatcaagrgcaggagtagctttcatgccaagacacaagccaaacacccagatcacttatagacatacacaagtttactctgtgagggtccctgggtgtgggctggcaatatctgcacattcttcatgcaaatgataaaatataaaggatgtttagaaccgrcaaacgtaagacatcttatgaatcatatatattaaaagtattttagtttatgatcaaccacaaagttgtctcttttactgaacactttgcttttaatttaacagttctagtatttactatgtgtacaagtrtctataattcttagagatggatttaatttcatattctcaagttgttttcagaagacagtctttaccatataacgcaaaatgtacaaaatagtttacaaactctactttggtcatatattggcaggctctttaacaactagaaagacaagatgttgtaaaattgactcatttgttcattatgtataccacatagagaacaaagtaaartaaaatgcacagaacattcaggataagatggctaatcttggcttactataaaatgactggcatggagccttttcctcttctttcttctgccttgttccctgaaccagtgcacacatacaatgtatactgctcagaaaggtgatttgattatttcatttccaaaagacaaatgtcgtatgaattttatcaaggttattcataaaatgtgctcttttattactaccttaaacatgtataaggcactccggaacgtctataaagactcagtatttcagaaaagtacttaacattgttaactatttgtacacttattaggaataaaatgcatacacagaacaatgagtataataagaaaatatcttcaaaatgtgaccagcttggcataggcttatagagaacgattctattcatttttgtggacttttccatctcctctaaaacccagtgagtgaacatggacttgtgtgtctcttggtgtcacttctagagatggtctcacaattccatatccaaaagtcattttcagaagacatttctttcctatgatttcttctttcttcctctttttaaataagacatttacaagatgtgggattttctaacataccttagaacttctttacatacagaaggccaagatatagcaaaataagttttcctctcaaaaaatggggggaaacttgagtgcagctctttcatatgctacaggcatgccttgttttattgtactttgcagtttttgcattttttacaaattgaagagctgtggcaaccctacatcaagcaagtctatcagtgccaattttctaatggcatgtgctcactcagtgttttgatttcacattttgttaattctcacaatacttcaaacttctttactgtaaaatctgttacagtgatctgttttcaggagtctttgatgttactgttgtaattgtttgggggcactacgaaccctatctctggttgagaaattttgtgtgtgttctgactgcttcagcaacctgctgttcccccattgctttcccttttttcaggctttcctagtccctgagccacaataatattggaatttggccaattaataaccctacaatgacctctaaatgttcaagtgaaaggaagaatcatatatctctcactttaaataaaaaaccagaaaagatgaagcttaatgaggaaggcacatggaaagctgatgtaggctgaaaggtaggcctcttgcgccaaacagagagccaagctgtagatgcaaagggaaaattcttgaaaattaaaagtgctactccaaggaacaggcaaatgataagcaagcgaaccatgcttactgctgatatggaggaagtctgagtggtctgcatagaagatcaaacgagccacaatgttcccttaagccaaagcctaataaagagaaagaccctaattccctccagtttcttgagggctgatcgaggtgaggaagctgccgaagaaaataactagcagaagttacttcgtgaggtttaagtaaagaagtcatctacataacagaaaagcacaaggtgaagcagcaagtgctgatgtacaaacttcagcaagttttccagaagacctagccaggagcattgatcaaggtggatacactaaacattagattttcaatgtagaagaagattccatctaggacttttttttttttttttttttttttttttaatctatgaggaaaagtcaatacctggcttcagagcttcaaaggacaagctgatcttcttgttaggggctaatgcggcttgtgactttaagtgaaagcgtatgctcattgaccattctgaaaatcatagggcccttaagaattatgctaaatctcctctgcctgtgctctataaatggaataacaaagccagatgacagcacatctgcttacagtgttgtttactaaacactttaagcccactattgaaacctactgcccagaaaaaaaggtttctttcaaagtatgactgctcattgacaatgtacctggtcactcaagagctctgatggaagtgtacaaagtgattaatgctgtttttgtatctgctaacacagtatccattctgcaacccatggatcaaggagtgattttgactttcaaatctgattattacaaaagtatatttcataaggctatagctcccatacatagtkacttctctgatggatctgggaaaagtacattgaaaacattctagaaaaaattcataattctagatgccattaagaacaatcatgattcatggaaataagtcaatatatcatgggaggagggcaaaatagtcttaaaagaaattgatttcatctcttataaatgtctttgaggggttcaagatttcaggggaagaagtaactgcagatgtggtagaaatagcaagagaactagaattagaagtggagtctgaagatgtgactggattgttgcaatataattatcaaacttgaacagatgaggagctgcttcttatggatgagcaaagaaaatggtttattgacatggaatctatttcccatgaagatgctatgaacattgttgagatgtcaacaaagacttataatttcctacaaacttagttgataaagcagtggcaagatttgagaggattgaattccaattttgaaaagtttttctgtaggtaaaatgctatcaaatagcattgcatactacagagaaatcttatgtgaaaggaagagtcaatcaatgcagcaaactttgttgtcttattttaataaattgccatagccaccccaaccttcagcaactaccacccagatgattcagcttccatcaacatggaggcaagaacctccaccagcagaaagtgacttgctgaagctcatgctgaaagcatttttagcaataaagtatttttaaattcaggtatgcacattgtttttctgatataatgctatcacagactaatataatacagtgtaaacgtaacttgtatgcatactgggaaaccaaaaatttcatgtgtctcactttattgtggtagtctagaacaaaacgtgcactatctctgagttatgtgtatatacactggtcttctattaatgtctacttaatcttcccaaaggatggcagacacatcctgttggccaagtgtggcacagtgttctaccatttctctcttccaacatcaaggtctggtgttgattaaccaacttttgtagyctcagctcattttctaggccccttaagggacagtacagagtggcatcttgttcactagggacacagtggtcacctcagatctgtgatctgcacagctccttagcctgaggctgagcagctagagctcgagtccacactggcccactctttcaactcctgatgcccctgttgggttggggttgccgtgttcttcccagccttccatgcccttcacacagtagtgttgtttactctgggcatggtgggggcccagctgtggcccagtgggtctggcttggagaggtcacaggcaggatggggattgctgccatcagggtctaagcctggccctgtgcctgagagcactcagctcacccaccagcctgagagctgggggcccagagggtrccagccaagctctatgtcttaccatgctctctgctagagttcacacctttattttcacacttcattttttctctgattaacattttatgatagaaagtatccttaggtcctgatcatatatttttttctgctgtaagctgttactaatattgaggtactttataaatacttttagattcattatggatttattactttgcttgaatcccacttaagaccttggccctggttcaaacactgcacactttttaaagcaggtagatgacaacatcttttcctgggtttcttgtcttgtctcctcctttcacctctgtcctctcatttctgttcttctctggctttcctctgcttttttcactcctctcatttctctgttggcattattgttattttttgttccaactgaccsttttgataggatcgttttctctcttcctcctttaatgtctcatttttttgatactgcaatatagaaagaaatgcagacaagaattacttactgggatttaccatgttataaagcacctctgctttttcttctttgctggtgattcattacttgaaaatattgacatcaatttccagaaatttataaaagtctccagtcaatacaactaaatgtcaaataaacctayagtggtttgggtaagaaagtgcccaatttactactttttttcttttcttgtaaatcacracagcgaatgtttggaacaaggctgcatcggggcagtgtaagaaattagcctatgtaaatgagttttttatttcctcagagcccttcatactagtgactcagattggtgagaactcgctgacctgtttagttcttagtgggacagcactacctccttatatcaaaattgccacaataatgtctccttttagttctgttaaccataggaaaacacacacctggaaatatgtaagagaccaatgactttgaactaagattttataattccatgctttttaaagagatcgaagtatcaggaaggctgatgtctcatatcccctaatrttgctgtgataccaattatgcatartacgccccaaatcatgtcattttcttgtcagatctttagtttagagaagactgttacaggtgataaccactttaaaaattaccactgtgttcaaaccatataaaaattgagtcaaggyagggcgcggtagctcacacctgtaatcccagcactttgggaggccgaggtgggtggatcatgaggtcagtagtttgagaycagcctgaccaacatggtgaaaccccatctctactaaaaatacaaaaattagccaggcatggtggcatgcrcctgtaatcccagctactcaggaggctgaggcaggagaattgcttgaatcggggaggcggaggttgctgtgagccgagattgcaccacagcactccaacctgggtgacagagcaasactccgtctcaaaaaaaaaaaaaaaaaaaaaaaaaattgagtcaaagtatattcaagacttgaatgtaagatmtggagccataaagctcttaggaaaaaaagtataaatctttgtgatgttggattaagcaatggtttcytagacatgccaccaaaaagcataagaaataaaaggaaaaaatagataaatgggacattgaaattaaaaactttcatacttcaaaggaaaccaccaagaaagtgaaagaacaactcacagaataagagaagatatttgcaaattacatatctgataaggcagttgtagctaaaatataaagaactattacaactcaataaaagacaacccaattaaaaatggataaaggatttgaacagacatttctccaaagaaaagtatagaaatggccaataaggacctgaaaagatgctcaacaccattagtcaccagggaactgaaaatcaaaaccataattagataccacttcacacccaccaggatggctgttataaaaaagacagataacgagttttggcaaggatgtggaaaaattggaaatgtcctacgttgctggcaggaatggaagatgctatagccactttgaaaaacagtctggcaatttctcaaacagttaagtaaagttaccatatattccaccggttctactcttagctgtgtacctaagagaaytgaaaccacacatacacacaaaaatttgtatatgaatattcatgacagcatcatttatattagccaaaaagtggaaacaagtcgaatatccatcaattaatgaacaggcaaataaaatgtggcatacccatacaatggaatattatttggcaataaaaataaattactcatagatgttacaccattgataaaccttgaaagcatgatgctaagtgaaagcaaacaagtcacaaaggaccacctgttatgagtccatttatatggaatatccagaatgggtgcatctataaagaggaaaagtaaattagtgatcgcctagggttggatggtgaagggacgggaacaggatgattgaagagtggtatgtaaggggaatagggcttctttttgggtaataaaaacgttctaaaattggttatgttgatagatgagctgtgctatgtayatattaaaagccattgaattgttcattttaaatgcgtgaattgtgtgacatgtgaagtatatctctataaagctgttaccaaaataaaagttctttcttgattagaagaataaagcctaaggatgatctttggaaacaccaaaagtgatatgaagaactgatgtgacatcaaaggttctttgttccatgccaaaattatgtaaacactggaaaaagcatgatattaaaaattccaataccaagaaaggctaaaactaagataaatcaccaagttttataaacaaagaagaaactcagtgaagagagctcaggaagtatcaaaagttgacatgggaaatcaatactggatgctgaagctgggtttggaattggagccaagctccttgaacaaatctcagagctaggattctgcttagctcacaaacacagtactaaaaagtctccacagccttaggaagctgaaagaaaactggttatttgtccagggctatgggttggcaagaccacatctgtgccctgtaccagagtaggctctgaatttacactatgctcacaatagtgtgtaggaatcccaaacagagaaaataatgcaaaacttggcctgtaactgctaccatatatggggtcccagcagaagagaccactgattgtactatagaaatgatttcttgtagggatggtttcatgcaaaacaactgccaaaacaaaataaaaacacaacagctcatagtaaaaaaaattgcaatatcagaaaatgaatcagtctgaagtagaatcagcaaataatcaagtctagaaatatagaataatctgagacattaaaaaataaatttgatatcttaaaaggtatagacttaaagctatataggcatatatatataggtatgtatacataggtatatatgtatataagtatagacttaaaggttcgtaggcagttatgaagaactaaaatgaaatttctagaaataaaattatcaatagattggacaaacaatggaccagacagctaattaagtaattagtgagtttgaagttaattataaagaaatcacccatgatggaatacgtagacctagaaatatggaaatagagctgtcgaggatagaataaaaaaaatctaaagcaggaattccagaataagagtatagaaataatgaaggagaggcaatagccaagtaggtaactgtatgtagtagagaagtgaattcccagactgaaggaacaaccaggcccacttagaaacatcacagtgaaactgtgaaatggataggaatgaaatgggaaggtaatctttaaaggtactgatgtcctgggcatagtggatcatacctgtaatcccaacactttgggaggctgaggcaggaggattgcttgaggccaggtgttcaagaacagcctggaaaacataacaagactttgtctctacaaaaaaaaaaaaaaaaaagccacacatagcaagataaagtaagttaaccaagtatatatttgtatatgtttatatatataataattaaaaatgaaaaatgatataccaggtaaattagaacaaaaagaaaaaacagtggtatagtaaattaatatcagacaaaatagaatttatagttaaccattagtaaagataaagagaaatattaataaagatatcaaatatgcattatgaactaaaatgaatgtacaaagcaaaacattaacaaaawaagatgaatctatccaaataggagatgttaacaccttacctcagaaattaataaattagatgaaaatatttagaaaaaatatagaagacttcaataactcactgaagctgatatgacagatgcgtgtatgactgcatgctctgaaaacgcaaatakccattttctcgagcacactaaattcagargtaggtttttttgtggtggttataggagcagactatgggtttgactaagcttgtcttagcactgscgcttgccagctgtgttacttggttaagttactttatcttgctatggctcagatgcttcattcgtaaattactgatcatcatagtaccttgtgcgtttgtgagctttaacaagwtaaaacatattaactgtttagaatagtgcctaacacatggtaaatacttgaaaaatgttagttggtattattactctagatgactgcaaaagaagaagcacaaaattccatgaaataagtttaataaaatgtggcaccaactataaaaaatagccccaacttccccatatagctggaaatttaaaaatggacttctaartaattcatgagttaatgaagmaagttaaatagctatcaaacaatatttgtaactaaatcagtgaacatagtatatataaaaacttgtggcatacagcgatcacttcaattgaagtttccaaaaatgaatgtacatatcaggaaawagatcatttggaactaaataaaagaaggttcaacccaagcagttagaggaggaatagcagagaacctctaatgaaagtgggaaggggaaaagcatacaagragaagcacaaagtaatacaatagcaaacagaaagaatggagaaattactaacaaaatacaaaggatggatttttgaaaaggatgttaaaatagacaagcccatggcaaaatcgatcaatttaaaaagcacacattaacacatacaggcaatatgagaaataaaaaaagatatcatttcagatctagtgaagatttttaaattctgagagaagaatttgaacatgttatgctaaataacctgaaatcttagactaactgaacgattttctaaatataaattttcaatatcaacataggaagagaacatctaaatatactaatattataatttaaagcattaaattagtagtaaaaatgctgctttcttccacaaggatgcatgcagtcagttaatatttattgtagctaggtcctagcctatgcaataaagttaagaaaagtatgtagggaatggaaaataaagaacaaaatggttgcatgagtatgtacatagaaaatccaagagcacttactgacagattttagaagtaataattttgttgtatataagaatcatttaagaatatttttgtaatacagaagcaaagaaaaatattacattcaaaaaaatcaaagtagcaataatagccataacatgcctataagatatctagttattatttttgtacctttattacaaaacagaatagagatctcagaaactgaccatataaaacatcaaattaatgggatggcattaaaaatcagtgaggagaggatagattattgttgacattgaagtaataagttgtacaaatacaaagataaattgagtttgtagctgacatttaaaacaaactaaaatgcagacaaatttaaacacatagatattgaatcaaaaatagtttaaattttgtagaaaatataggggaatctatacatatatattctgccttggaatagcaagagagttctttaaaagcatacaaaaacaaacaaacaaacaaaacccaaacaaaacaaaacaaaaacaagccaaaagggagaagacagatcaatttaactacaccacaaccacttaaaagctgtagtatatcaaaataaaaagctaaaaggccagttacagatcaaaaaatgataattgtgttatatatacttgagtctttttatataacaaaacaaatgaaaataaaaagattaggttccaggcttataactccaacgaattagtaagaaatgaaaaccaattgattgagtagaataaaaactcaagaatgggaacaaggagtttataacaaggcataagaaaatggccaataaataagaaaatgttcaagcttaccagtaatcaagatcatacaagtttaaaaaaaaatcaagggcataaaattttatgtctcatcaggtaagaaaaaaaaatgaaaatatctggccgtaccaaatatgggagaagttatagggaattggaaattatcaaatactagtggtgggagaataaattggtcaaactactttagagggcagtttagcaatatctagtaatgttgaaaatttgcattctatactagtaatagtagggaaattctcatgtatgtgccatggatgttaatagctgcattgattttaatagtgaaaaattggaaacaatrtagattaccatttatatatgacatattatgtaagagttaaaataaatgcactatatcttcatgtactaacattggccaaatattgagagcatagtggtgatagaaacaaataaaagcatagtataatacactctttataaatagatacatatgagggaaaataaaaatatggatagggaaggattcacagcaacttcagtattataataatgtctgggtaggaaaattaatttttggtggtacatgatctaacagcaggagaatagctagctggtatggaatgggaaatgcatgtctgagcatggctgaaggccacagaggaaaattcacccatgaaagatttacagtgattgtgggagtcacaaaccatacaacaattttaatatgttcaccatacgaaatggattcttcattatttataagttttctcagttatatactaatattcacaggtcaagagagtgattttatttccagaaaagcaacagaacatgaatatataaaaagtatattttaaaaagcaaaaggacatgaatatataaaaatgtgcagtatttttccaatagtcacaatttaaaagccatgttttggccagtaaatgtgttatrtagaatgtagtagaatatttgaactcattatgcttgcagtttccataaataaatctgccgctgtttaaaagaattggagttaatatctacaaactgggtaaaatattagcacatttttaatgagattttgtttatgcttttattgtaaaactatttgttctgtaaccattttaattagtaattgtttctttagaatggataatatgttttaatttcacaaatatatctatattgcaagtatcttagtagaggcaatcatcttctaaataatttttaccaaaatacatttcttaagaaggtatagattcttattcatataaataattatattttacagactcaccaccaatagtctattaatagcttctatagcagacttttccttaaggatgttagattaaggaataggaaggaagccaatgtggcttggataaaagtagcaaagggaagagcaacagaagacgaagtcagagagttgaggaggaggtgtccagatcattagttaaatgaaagaatgaatcagccacttttaaaatatgaatatgtagtataagattcagaaaatgaatttataatctggayaggaatctaggctccatcataaacttcttatttgtaagttatttgtccttttgttccctcagtttttcagtctgcaaaaatgggactcacagtcttactggattgtttttatagttaaatgtgataacttaattctgtaataaataaatatgagaattaaatttgagaaataaattcctcagaacttgcattgcagagtgctggatacattttcgtgtctaacacatrttagtattccttcctttcactcttcccagttaacatattctcttcaagctataagggcagtggggaagttcaaattgctttaggaagagctataaacaaaatcaatgacccaggatttaccatgaaagaaagtggaatcttgttcacatagtaaaatagaaggaygatttgtttaggatcttcaggatgcataatggataggtttctggaggcccatgccccactcaaattgtatgtaattatctttacgtatatgcatttcatttagatttctgtctaaacttgcatcagactctcaaagtacccatctcctctgaaatattagcatgcactggctcttaaacatgaatggtacatcctttataaaacagaatgatactgaggatcatccaggctacttttcacatttggataagcgcatttgcttcactttcaaaatgtgaactgcacatacacaaaaacttcttgttcctttctctttccctctccattaagttgcaaatagcttggggaaagtgcaacagatctgatcttggtccatcatacctcaagatgagttaattccctgggaatctggggtggggtgataaagggcttctgacatggagttgacttcactttgtcaaatttagtaggggcaagcccaacttttatctattcacgtttaataaatttcaatgaaaaacctactgtgtgccacaagctgtgccaggtactcgacctgtcgtggtgaaccagagagggaagtaagcaaacaaaccagcaaggagattttaaattacaggggcaggggactgggggtgggcacaggggtgtggggatgtgtagggagaggtatatgtgccctgatggaaaccaaccctgctgcctttagggaggctgttttatcatgtggtggtctgggaaggtctgggaaggtggtgtgtgtggggtggggggtggagggacacattagactgggactgccaaraaaagagcaaggaaaaccaataacaaggcagaggcctcaggtaaatgggaaaaagtatgtcctgttcaaggaacagaaaggagtgtcaaaagacaaaattacaacaaatttaaagacctcaattggctttatttgtgaatctagaatccataaaatgtaagtgttccaatgagttgatcagagggggttagttttaacaggactggaaaaaagcagaaacaaggaacatgaagtagagggtcatttcagcgttgcttttcttgcagggcgggagtagggagacagaacagtggaaacataacttaaagcagagggaacttcattatcatgccaatggaagattgaaactggcctgtttgggaaattggttgtttggtgacagaactttggtgtgagtttttatcttttagccctttatctgttggagccaagtgcaggatcttagttcaaaacaatggacttctataatttttatttaacagaagccagtgtggcttgagcatcctgtgtgagggagacaggtaagcagtaaggttggaggggcaggcaggagtctgatcataccaatgcttataggtcaagtttgggaatttgggtttttctgtaagagaaataggagtamatttaaaaattctgagtagaaggagtgacctgatttaagtgtttaaactatgactcccagtgatccttggaaaagggactgtaggggtcaatgtagatatagggagtccccctagatcaaaaccaccaagatatcttgcaagttctatcactwccaaatgtatatctcagatccagcctcttctttggcagtgtagggttgaagggaagtggttaattaccaagttcttggcttgaataactgggtgaatggggttattattttctttgatgaggaagactaggaaggctcagattttagtgcgtggagagtggaaaattgtttcttcctctccctcccttcctctcttccttccttccttttatccttccttccccttctttagacaggttctcactgtttgcccaggctggaaatgtagtggcaggattgtagctcactgcagccttgaacttctgggctcaagagatcctcccacctcagcctcctaagtggctgcgactacaggcatctgccaccacagatgttctctattttcaatgtatcaagttttaggtacctagtaaacatccagtaatataatagaacataggagtctaaagtgcagaggaactgtgcagccktgagatgaagattgagaatcaacaatatacaaaggctattttaaccacaggatgaataagacagagaagtaaagaagacctgggtaggcagttcgtctcacctgacacgtgttgctccaagagaaagcatagaaatgattttgtaggcacaagtgggagttgagtcaagcttgggaggatttcttttctttttttattaaggtgaactttttttagaacacatttgtttatgaatggaagtgatccagttttagggagcaaatgatgatgccaagagaagatggctcactgcaattgtgagggttaagggttgagacatgtcttctacccataggtcagatattcaacttcctttctttacctgggtaactcagtggaaaatggttgcttaaaatgcagctgccacccctgcctgcagaatcacaggcaataacaccatttggttaagaggttttataaagcttagacagactcctctaggcattaataaaagcaaagataccctcctgtctagttgtggtagtacacagaattttccctattatttgaatctctcccttgtcccttctagaataggcatagtttctctagtgagtaattatgtcaatttttaagatcctttgcgtaaagatcttcctattcatggaaaagaatgtttattttgcttttgccacagagtaaatgtaccatgcaattacaaagaacttctttatcattaagacctttgcatcaagaatctagtctcagagaactttctcaaaggactggaagaaaggtatgctaattccccaaatgccacaaaagaagaggtaattgtcttagccaagaagtctgccacctacagggcagaaggaaagaatgcacgaatcttccagtggataataygtcactttgatgggtattccccataacaagaattaaacagcaatgtgtaacttactaacttttccctgacctaagggcttcaaagttttatcattgcttggtttaggtgatgacttagcattgttgtatatttgctcccatttccaattccttgcatcaagaagtctcccccaagtgaattagctaaaatatttcctgctttatctacatcatgggactagatattatgaatttattcagtagtctgattgacttctaaacttagttatataaaggaagatatcacgatgtaacagaactcatccccaaggctactgcagacaaaattaggagaataacaaacaaatgcaaatgaaagtcatgyagaaatggtactgtttcccctataaattctaatcactcaaactgtatgtccatatttcaactgcatctactcagatccttcagaacagattgttaaaaaaaaaatgtggcgatgttagttttgttatttgattttttaatttataagcattccctgcagatatcacagtgacagcaaatttatagagtgctaataaaaaggatgcactggatggaaatattttaagatatgatatttcttcaagtaattacttgaaccagtaaggtctgtagttgtaacattttgcatataagcctgttcttttattaattatttgagttcaggaataaaaaaaaaagacagaatttacttttggaaaaaaaacgtagatttttrgtaatatatgagaagaagtacaaaaagctgatgaaagttcatgcttcttaatcattgaagccacttttctcctttaaggaaagactctccattctcacaatccagcatctggcatacagcttcacatggcaaatggcatcaggaagccaggagtgttttcctggcagcctggttgggccatcttctcctggacacctgctgtgttccagggactttatcacctctttgattgctggcagttcacttcatgatcagtgttaagtattttctccatgggaaggaagtgtgggatataaaaaatcataagagggccgggcatggtggctcacacctgtaatcccagcactttgggagaccaaggcggtttatcrcttcaggtcaggagtttgagaccasccttgccaacacggtgaaacccaatatctactaaaaatacaaaaattagccaggcatgctggtacatgcctgtaatcccagctactgaggatgctgagacaggcgaattgcttgaacctgagaggcagaggttaccatgagccaagatcactctattgcactccagcctggctgggggatagaacgagactctgtctcaaaaaaaaaaaaaaaaagataaatcataagggctgccctttacaaattctggttctgtgacttcctaccgtgactttggacaagtttcctagctgttctgagacttagttttatcatctgtagaatgagattaacagtatgtatcttcagggttgctgacagaatttaaaataaaatatgcaagttagctagcacaatgtagatgatccaaaagtggtatccactcacctcttcacaaactgtagttcatggaccatgtaagtcaagaattaaggtacaactattatgagtaagaaaaaaataagaaatactctccagtttcctatgaaaggattcatatttcttaaggttatggtctacatctgtaattcaattaaaaatatatagaaaatattcttaaggtaataaaagccatctatgacaaacccacagccaacattatactgaacagggaaaaactgaaagcattccccctgagagctggaacaagacaaggatgcccactttcaccacttctattcaacatagtactggaagtcctagccagagcaatcagacaagagaaagaaataaagggcatccaaaacagtaaagagaaagtcaaaattgttgctgttcaccagtgatatgcctagaaaatatttttgatatgcactatggataatgcaaaaataggtaagttattattacccttaaggaatattcacttacaaattaattgtaatgcaaggtaggtaatggtttaagagaattccaactagctacagaagcacagtaaagacagaaattacttttggtttaacagctaaggaagacaaaataagacatagcagctaagaatgaagtaatcttaacatttgcataaatgtagatgcgtggaagagcactcctgagaaattaaatttctcaaggcatgatcccagcaccagctgcttctacatcacctgggaatttgtgagaaatgtaagattttgcgttccaccccagacctagtgagtcagaaattctgtggattcttccaatgatgtgagttttaacaagccttccaggtgattctgatgcatactaaaactatagccactagattaaaccatccaagtgaaagtaagagctgggaaagataaagccatttcaggagatggaagatagttcaatttttctggacttcatggtgtaagagaggcagtggcaaaagaaaaagctaggttgatgtaatctaaatgaaggatttccctgttacatttaagctagttttggctttattccactggcggaggggaaccatggaaaaggctgtttagggaacagggacaaaggcactgtgagagattttaaaacttgggagcaactcattttctgcccactaaaaggctcactgaaccagaaagaattacagtagacacattaaatggttttcccrgttccctttctgggaagcatccacaccccacccccagttctcctaccctgatgttcacataccagtctttacagctgtgagcctccttccagctatgttttcccagttgaccacaacttccactgatgggcaagcatgggtacctgactcagccagagccaataaggatccattcctttttactgcatagtgaaaagcagattttataactgggagaaagcaaaggagagagaggaaagaggaaaagcaaataacggagaagttggagagcaagtgaagagaggagtgggagagaacaggagcacacctccaggcatatggcccctgggtcctgcccattcctgaggcccagcaccattcataggtgccttaggttccaggtactgccactgtatccttatagtaaagtcccttttttgcttaagctacttgttgctcatcaaggtgcaatgatatcgaatttaagtctatatgtatacataatcctgtgtcaaagattacttaygtagaatgggtcatgcataaaacgacttggttcaattgtatgtttttctgggtccaggaagagtcctaactgcttcataggttaagtcagaaaccaggcttcctgtctctagaaggcagcctctgcaagacttgtccattagaggctcacctattctttctatgacctggagcctcttaaagtaagtgcaaaatttaacacagcaaaataaagagaacaaagacttaaaaaaaacaaacraaaaaaacaccttgcgacctccatcatctgttattacatgttacagatcaaacaaaacactagtaactgatgatgcagagaaaagcagatgccaaattcagcatgcactgtctccagtggtctgattctttcatcctctaaggccagtcaagtaacatcactgttaacataaaatggctgaaagaaacggaggaagcaagtactactggtattattccatctgatacatccttctttgaaaaccctggacttgtggcctatatttatgaaacattccatccatcacaaaattgttttctctgaactttgaaaataatgcggatgctagcaaagttactgtttacttctaaactgcttggagcaacactaagtcatttgaacaaaactaaattaaaaatgttaatctattatgattattatgatcaaggacaatccaaaacttaaaaatactcaaaaaggtaaaattttatccattttttataaatacatatatttaagcatacaaatatatgaaaataaatatacagaaataaatataaatatatgaaagtatataacacacacatattttgatcaaagattaattacacaggctggattttgtgaggaataagtcacacatcactagattttgcaaatacaacacttgaaaattctcttaaagaaaatactctcaatacattttaagatttctaagaaggtttattaaatgttccaatttggcacaaaagcaatttctaatctttctagttcagttctataaacctatttactgtcagctctttcttttcatttattccttttgttaggactaggataatttaattaggataaaagagaagggtaatgattaccgaataccatcctgctattgacaacctgtggcccttccagctactaactgaggaactgctactgtcttcgatttttgtgtttgtttgtttgtaatgatacattcctccaactccctagctaagcttttgkctaatgatatctaagaaaggaaaaacaacatgtcaggcgctgctgtctagctcaaagcacaatgttatggctcatgctgggcctggctgcctaggatctgggatacacagaaacaggcacatagaatggctggagyggggcactctctgggcagggagggatgactcagatggatacagtgccattggcttgagcatacacgacaggtagacatctccatccacgaatgagatcggaaccagaaacagcatcacacctatgcatatttaacaccaacccctccagccagtggagatgtgggccagactgctctgccaggcagccatcctcctcagtctcagtatctactctctctggcatggcaatacagcactcgagcaacaaatacgtactgagtactctttatacagctgtgaaaaaaccaaaagtcctgtccctatgggggttaggagagaaacaattcactaaaatggtaaatatatagtatattagctagagagtaatgtaagtgctaaggggaaaaataaagcagggtaatctggaggggaaatgtcaggcgtgggaggttaccattttagacagaaaggctggggaggaacaccctgagatgacattggagtaaaaccctgggggaatggaggaaggaatacatggagatagctggggaagaaattttctgggcagagaagaccattgcaaaggccctgaacagtcatctgggcagagaagaccattgcaaatagatgattttctaggtgttcaaaggacaacaaggaggtgtagctaaaacagtgtgggttaggatggggataacaggagatgaggtcagatagaagatccagaccaagcacatcatagaaaggctcttggctctcttactttgagatgggaacttattcgagggttttccacagatgggtggcatgatctgacttattttctaacaggattattctggctgctgagttgagaatcgacttaagtggagaaaaggtagaatcagggtgggggcagttaggagttattccagtagtccaggaggggcatgatggtgacttggaacagagggatagccctggagaggtgacaagttctcaaattctgggtacatttcgtaagtgcagccatcaggatttgccaaatatcagatgtatgatagataaagtatatacgagtcaagaaaggtttggggtctgaataactggaaaggatggagttatctaaacaaagatggggaagtgtaccccaataagcagattgggaggggaccatcaggacactagattcagatatgttcagtatgaaaagccttgtaggtgaagactttttggctgtcatggccattcatggctataagaactagggatataaatttgagaatattcagtatattgatggaatttaaagtcatgggattagatgagattagacaaaagcaacccctgacattcaggagcctgcctcgcactrttacctaagccctggtgttcccctgttgcccataaacaattgcattgaacaccaacrttgggcaaggccactctgaccacaatggatcaagaaaaaatagacacagacaaaacatgaatattttttaaagaagatcaactatcttcctatttcgattattaactgttgcttctttgctagttacagttgtagctttgctctagtctgcccttctctatagataagatttattgagataatcatagaagtttcagacagcactcagtccacagtgaaacttcccttccttggactctctccaaaatcatccaaccaaatcctaaaccttgtaataatcctttctaacctcatcttactaaaactatcatggttacctatgtatgagtatgtgttctccctgttgtagtgagtaataaacccaactttctcaactacaggtgtgttccaggtgtgtttggatggaagggattgacttagaaaatacataaacaatataagagctctaaggactgggccctgaagcactccaacacataaaggacagggagatgacaaggggtcaattaargatattgaaaagaacagccaggggcatagaaggtaaaccaggaatgtatgctgttctggaagccaagtgtagatgaaaatgaccaactgcatcaattgctttagagcggtcaaataagacaaggactgagagccggtttggcaactttattagtgaccttgacaaggacagctggatggtggaaattatgattgatgtagattcaggagaggataaggaagagaaactggaggcggcatgcatagacaactcttttaaaatatcttgatgcaaagggaagaagagaaaaagcaataactggagggtgaagtagtatcaaaagagggctgcattaagatgggagaaacagcacttttctatactgattggacaaacaatccagtagagaggggacattatggtgcaggagagaaagtactgttggggccgtgttctttttcgaatggagctgggacctattgtacaagtggaagggttggctaagttggagcatggtaaagggagaggagatgggtatgaaggtatgcagaccagatgaggtgggtgggagcaaagcttagggaagaggttccttcccttgtaattgcttctggttcttaaagaatggggatgcaagatcatcagctgacagtgaggataggagaggaaatatttgaggttcaaggtttgaagagacggaaggaaatagttgtttaggagaacgaaagtagatgggggtttagggaaataaagaatgtttgctgagcagcatgaagaactttcttaaattaagcaaacattaattcattttccatgtacttaytctttcagtaaatatttacataaacatataataggaaatgtaggagatgaagctatgaactcctctgcttattaccttctctactctttaattgtgagaattcctaagattatcttctcagttcctcttttttcccttttaaaattccctcctttgagacatcattcaatcccatgctttcaggtatagtgtagagctagggtaaagtattccctatatgctttctcatcaaaactagaccaacwgtccagtaaaattataatgggacaagtatttatcattttaaattttcttttctttctttctgtttttttcttttgagacagggtgatatggtttggctgtgtccccatccaaatctcatcttgaattcccatgtgttgtgggagtgacctggtgggaggtaactgaatcataggggcaggttgttcctatgctgatctcataataatgaagaagtctcatgagatctgatggttttataagggggagtttccctgcacaagttctctctctgtgcctgcttccatctatgtaagatgtgacttactcctccttgccttccaccatgattgtgaggctttcccagccatatgtaactgtaagtccattaaacctctttcttttgtaaattgcccagtcttgggtatgtctttatcagcagtgtgaaaacagactaatacacagagttttgttctgttgcccaggctggagtacagtggtgcaatcttgattcatggcagcctcgacctcctgrgctcaagtgatcctcctacctcagcttcccatatagctgggactacaggcatgcaccaccatgcccagataattttgtatttttttgtagagattgagtttcgccatgttgcccaggctggtctcgaatttctggccacaagtgatctgcccccttggcctccaaaagtgctgggattacaggtgtgagccatcatgcccagcctgtcattttaaattttctagcagccacattaataaaagtaaaaagacacaaggtaaaactaattktaatatattttatttaacccaactatctgaaatattatttcaagaaataagataaacaatattgacatattttacattttttggtgctaagtgttcaaaattcagtgtgtactttttcttagagcacttctcaattcaaaccagccacagttcaataacacaatagtcgtatgtggtcttaatgaacagtacagctctagactctcattttccaatgaccactggacacttctgcctcaacattccacaagaacaactgaaaattttctaagccaaattaatcctgtctgctcagatctgttcctcttcccgtctttattacatttctattttattttctcctctctctcattttccattgagaaaagggtcagaacaagtgctcttggaagtctcctttctgttcctatcatcacactagttctcaccatgataatttctaccttgacaattgcaataacctcctaactggtctctccatttgtaatctcctctccattttatgctttgcttcaggagaaatccctcttgatctcaggtttcatgatgtcactttaagtcttgctggaaggacattggtgcagattttagttcccaaagtggatccaccaatatatctatcccacattttctcctcatgcaacatacagttgatacttgtctacgtggagatgaggtccatattctctccccttgaatctgggaaggcttgtgatcaaaacagatgcaaagttgcctaacttctgagttaggtcataaaagcagtatggctttcacctgattctctctcttgggctcatgtcttgggatccctgagccaaaatgcaaaaagctcagctattctgaagctaccatgtaggagaaatcatgtggagagaccacctggagacaagagatgtctagggatccccaactctaatactatttgtttggtacttcagatgacaccagcccctacacctcaaggggcatcagtggatgctgagtggaacagggatgatctatctactttacatcctacccagattgcagggtcatacgcaaaatraattttgctgttgctcattcagtttggggcattttgttacacagcattagatatctagaacacttgtcacttctcactttttatctttgtatatcatccacctgcctaatcctaggaggttcattatgtactcaaggtgataagaataagtctttggcacacacatacaaaaactggaaaaagctagtgttgttctataagaacaaattgattaacagttgccttttacctcattctagtctcttacttgtgttgcatagaaaatgaggcttgggatatattagacaaagtaaggatagcttctgtgaatgtcaactgaactgtgaaagatactatcaattttatattatttaccttaacagcacatccaaagtaaactcattttaaaatataaagaatgctgcaaactaattgtgtagagataattttaaaaataggcataagtcatgcctttcttatgattatatttaataaatggagaatatggtttcttgcattttatactgkggtgcaataggaaaaataccagggtaggaattgtgtttttgatgtgtgttctggccgtggtccacactgggtaacatgagagagtgaactcaataattgataaagctctccctctcctttagaactaaactgctatagtcttttgtttctactctcttttattttaaccttctttcttccttctctcttccttctttttttttgctttataacatatttgtggatttttatattttttgttaataaatagttgggaagtcaaatgtcatggtattaatgtccacaaagctgaatctcttattgaattttttgaatatcagctatgtacaaatgggacatattattcaactccagggttacaaagttctgtgcttaccagaaaactcattacagaaaattttgttcttttcttagaatagcatagccctttgggctatatctttcagtaaccaaagtttccctcctataatgttgcttagacaacgttctaaaggtaagataccattacacttaagttcacactgtgtgattattttgtggaggaaatgattttgtcacctcaggtaggaatttgcagtggatgagagggaatcatcttctcctacatttggttttattgataaatgcttttgcatcttatgtagtcacatttttgagtgaaggagtttaatttttagtttgagttttaacagtagatttccaaagtttccttgacaaactcttaaatctagaatgtcatattccacttctgaatttgctgcatttcctggctccacatttagtatctatatgacttgtgcaacttaactgatcttactgagccccaaatatgtgtacaatatttggaatttttatgaaagatatattttatactattatatatattttatattgctggaaatataggagttaattatttccattttttataggaagaatagagtcagtgatgataatctaccctccccaaactccatctagccccactcccctgcacattttttccccatctccttctctacatcactctaagggattcaccctgaccctctctcccacacataccttccctgacatgatatctagacttcaaaccctaggacaggaactcatccttacaaaaagatatttgttccttgttttaatggaatttccttctctccatgatcttatgtaagtaatataatttttgttgtgtatattatttttgaatatataagttcccaacaaagatacaaatatttatacattcacaagaagtggttctttaaatatatgcttttttgacttgactttgccttgctattggtatgagattgtacaaatgtgttttaatatttttctttaagctttatttgttttcttatcaggctatggtgtgtaaaggaagtttagtaatgaatgattcatttctgtgcagattgtgagatggaaaaatgctgataagtatcctttatttttactcctttgggataaaaaaaaggataagactaagttggcctaggttgagctaaggcatctagcattgaaagggaagatggaagagctgctcatagaagcatatgtaacctcctgagccttgtccaataccctctcttaaactgctgaatatccttgtctggaagggatttcgtgaactatttttctccatgagcacaaatatgtcactagtaataaagttgcaggaataaaatagtyatagtcaccagatataaggcagcccttaaagtttaatgaagtgatctgattacattaaagtcaattctcagttaatggaagactgaatattcatctaaccaacctccatgcctctgttgctgagtagcccatcactacttcttgctaatggcccagagggcaagaggggcaaggtaaggtagagatggtgtgggcttggagtcagggcaattagggtgcaaatcctggatcccacttactatttgtgataggcaagggctaaggactaaattccgccctctctcacaaataagttcatatgttggagccctaacctccaatgtgrctatttggagatagagcttttaggagcttattaaggttaaatgacagtataagagtgaagtcctaatccaatggtattggtggctttataagaagaagagtaagagagatcattttctctatctctccatgcatgtgcagaggaaatgccatgtgagcacacagcaagaaggcagccatttgcaaaccagaaagagagctctccccagaacctgaccatggtggcatcctgatgttggacttcaagcctccaaaactgttagagaatacactgctgttctttagccactcaatctatagtgttttattatggcagcctgagcaaacagacagcaagtgactaaaccctttgtctctttgttacaatagaaataataatacctacttcacaagatcattgtgaggactaaaagagatcatgtacataaggacttggacatttaaagaaaagaagaaaagtttcagcaaaaatattgtccatatttatatacgattgcaaaacaagtttggttacatacccctcaccccatggctcagacactttcagaatgcttgttaaaaatacagattcttggacccacattagacctaaagaattaggatctctctgaaagggctaaataatttggattttaayaaattccagatgctcttttgtacactaaaatttaggggcactgccccaaaggaatggtacaataatcagtgtctcaaaatgttgttctataaatgcttaatgccaggaactcagattaaagcaatttatgtcagtagattccaattgacaagcagaagattaacagaagttcttatctgaaagctactatctgagtctgcttggctattgttaatcagcacattaattctttagatgtactataaaggacagtgagtgagtgctrgttgtaaaattaattaagataatgtaataacatccctgtgcaattttataaattgccaccctatttaaatatcactttctgatcaataatagatgagaacacagtgtgttcaggaagaaaaaagaactgaaagaagttactgctcatgattctttatctgtgctgtcttgaataaaaaagtagcaggtgaagttgtctttctgtaggcacatgtaacagctgagcagaaggaaaacagcagcgctgttcctccctggctcacagaaatattgactccttttttagtgatactaagtctcatctaaatgattaaatctttaaaaagaatgccaaatacccagcaaatggtaattacaatgcctaatccacctcctcacttcttcgtgcaagacaatatttactctgggttatgtgtttgccagaacaatcacagcccagcttcagctggtgggtgttcagctgtatctttgccatgcatttttgcaggatgstatgaagacccaactgaaactaagaagcttygtcaatggttaaaaatgtctcactagaaatgtatttgcatttcacttggatctcaattggatttctttttttattccaaataattttagctctcttctctcttccttcctttgctatgtgcctaatctcacaagccatatgtgataatgagtttttttttctactttatagtcccctttagtttatataatggatttagtccttattgagcttctaccatgtactaggcacactgctagttactgaagtccagatctgccaaaactgacatgaaatgaaacaggaagctgaaatcccaacacttcatagagcatatttgtcatgaccctcacaggattatgtcaatcattatgtgttatggataagttatcttctttcaggaaagttatcttctttcatttgtaagatattttgtaagtctcattatcatttttatcatgtttgaacaattgtttgcaaattaaatgctttaatttttttccttccaattcccctcatttttcacaattgtattagttccctattgctgctgtaaaaaattaccacaaatttagtgtcttaaaagaacacaggcgtattgtcttacagttccggagtttagaggtttgaaatgggtctctctggatgaaaatcaaggtgtcagcaggactgcattcttttctgaaggctctagggagaatctgttttcttgtccttttcagcttctagaagctgcttgcattcattggcttatggacaccttctatcttcaaagccagcaatgaccaatggagtctttctgattatgcctgctctctggtctggctcttctgcctccctcttcctcattaaaggagctttgtgatcatattgggccttctgagataatccagggtaatcttcttattttaaatccagctgatcagccatcttaatcccatctccaaccttaattctcctatgcaacataatacattcacacgttcaagggagaaagacatgaacatctttggtggcaggcattagtctgcctatcacaaatatgtagtgattctttcctgtttcagaagttaaatggtatttagcaagtctttttcttcttactatatagttttgggtgggagttcctcttctcttcagcagtttgtaacttagaaatcacttgctttcagggtcagctaaagaaactataaagactcatctggtttgcagtatcctattgcctsttaaacatccctttctggtatccttctgctcaggaccatcctgttgtcctcctggatctacagctggctgtgcctttgtatttttctcttgctatttgacctttgttctctttagtgagtattctcttctctattccattttattgtaggcagagaaaccatatttaaattttttcttcaaattattgtgttctttctctggcaaaaacgttaaatggtttaacaatttattgatcatatctaactttttctgccaatgtaggtgtgtgagcttctgttttattccacactgtcatatttattcctctcaacaacatttgtttgaaaataaaggctggggccggtcacggtggctcacgcctgtaatcccagcattttaggaggccgaggcgggcagataacgaggtcaggagatcgagaccatcctggctatcacggtgaaaccccatctccactaaaaatatatttaaaaaaaaatagccaggcttggtgggggcgcctgtagtctcagctactcaggaggctgagtcaggaggatggggtgaatccgggaggcggagcttgcagtgagcggagattgcaccactgcactccagtctgggtgatagagcgagagtccatctcaaaaaaaaaaaaataataatccaataaataaaaataaaatacaggccagacttcattcagatttcttttatttttacctaatgcatgttcattttctgtcttgggatctatgttacatttagtcagtaaatgcagtggaagtgacattctgggacttgtgatgctaagtcagaagacttataccttctatccaagactctatgaaaagataccccactctctgaggccaccatatcagaggggctagcataggtgctatggtcaattgtcctgctgagcccattcttctagccattaccaccaagactgcagaaatgtaggtaaagctgacttgagctctctggaggagccaaaccaccagcagaatacctccaagtgacttctgttaatgccatatggcacagataatttctcaggcaggcccttcctgaattcttgacccacacatttatagcagatgataagatggttgttgttattataagccacaaaatttgggggttattttgttatatagcaagacatgacaagcattgctgaatggctttctggtcctgatagtgaatcatgcaggagaagttaaggctcattctatgtcaattttaaagctggcatactgccaatgcatgcattattctagtacattaaataaaggacttcatttttaggctctgtcagagcctttaatctttatatacatgtctatttgcacaaaaatgaaatatatcttctttgttacattttcagatcttcctctgataggggcaagagtaatctaacaaacattgtttataaaaacaagctctaacctcttttgtgacatgaaattggtgtataatttctaccgttaaaatgaaagaaaattattaaattgataggaaattatctttctttcgaaagtaartattcccttttatttatattagaaacttatacaaagttcattttattttcttggtgtaaatatattcattagcaagtcatgctatggtgtggaatttgggaaagtttgcacaataaaaaaatacatagtcaacaattaacttttaaatgaaaagtccaaagacataagtattgatataacattagtgtctgcatatctttataagccacgtggttatgataacaatataatgaatgagaaaaaaactatgcttgaaagtagcaataaattcttttccaataaaagatgaaaatactgtatcatcaaagtgttaacaaattttagagtggatactatgaaagtcagttatgaaatactgtaatacaaaaggaaggataaatagtagtatccagttagcttttaaataaaaaggtaatagagctaaacctaattaattatgataacttgattcatgaatgacctgcagtttccctttctattatggaaacaaaaatatttgcttggaaatttggataatttaagactgcagagaaatgtttagccaatttcaggttaagggaaactgttttcaagatcagatgcaatttgcatggaaataacattttaattacctatcaggcttgaataccatcaaaactgatcccagatggatacctgatggattaatatagtttgatttattatatatggtggtgaaaaaacaactaaaattgcattaaaaaaatttcacccatacagatgttttcatttatcagacttagttaagcagttagtatctctagaaagctccatattgggctgattgatgtaagaacttgaagaataagtatgtacattcagcaaagggatgtctggatatggagtggttggttcatgagaaagtgatcttgtgaataattcaattaagcactcttgagctccccagtaaggttgtctgatatcaagcaccacttcaggtgagccgagagttttgggarcagagtcaaaactctgttcagtttggctaagaactcccttaaccaaactgaaatggacaaaccaaaatgcacaaagtgtgttttaagcccaatttcttttcccagtggctctcttctattcccttaccaggtatctccttcctctgttattcccaggtcatcgttttctcgtctcaaatttgtaattctcagtatcagattttctcagctgatgaaaaacttggtcctaaatgtgaatgtattcaatgttttacattctttagatgtcttgcatcttcaggaagagctgactattttaatatctggatctttgagctagagacccctgagtttgagtctgagtgattccatttacccaaagcactgcttctcaatattcatgtgcatataaatcacttggatatcttattaaaatccagatcctaattcattagatcagggacttgagcctgagattctgcatttcagacaagctctcaggtgatgttgtagctgctattccatggaccatgttttgcttagcagaagcctagaacatcttacctgcctctgttttctatcaactgaatataataatgcccctactttctayagttgatgygggtgttacatgtgtgccttatgtaaagtgcctggtatagttcccggccaaaaatcatgcagtgtatggtggtagtggtggtagcagcaagtagtgtggagataataagagttttaataatatattgggaaatttcaggctgaagggcttgcaagtaatttgtaggtataggaacttactcagataccaaatgccgttcttcagaagcagccattcagtcacctgcacctagggctttccccgatgggcaaagcgtacacctgaatagttccttagttgtcctccaayaatttaagactacaaaggcttctgagagtccatggtaatcttttaggttttgtggtctagttgcttatatgatgtgagccrtgagttaacattttctttcacagcctgacttagatgttttaaatggcaaattcaggagagaacaatgtatgagtctttaattttattttgtttgttagtaactacagatctggaataatattcactgagtgtttcagaaagcagagaattaaaaggcaacattacagtgcttcttagcattaataaagtagtatgtgggatatagaagaaaagcataattttcacctcacctttacctctaggggccttcaagaacttgaaataaaacactttccccttgataaagaatagtaggtggggaaggttatgaatcacttctttaatgtctttggttgcttacattactctttaattccaggaaactctgcatataagtgcaaaaaccccagagtttcagtacctcagtgttgaataagcagagcagagaaacaaaagaaggaaggtgatattaccagtacttggctatgtcactggagtcttactgcccatgttttattrgctgatgtttcagggaaacactttttttcttgagtcttttttttcccccaagatgctatttctaaaaggtcagttatttgtcatgtaactattactgcatattaaaatgcacaatgcatcaaattagaataagctaaaaatactctagcagttcatgcagyacatattttaatgatattatttttaagattagtgtgtttaagggcacaggtagtatttacaatggagtatctatcaagattttcagacttgaggcaatggttatctttcataatccatttgaaataggcttcacagtctctttaactttaagaggatatgttttccttctcagattttttaagggaagcactacacgtctttgattttctgcagtactgcttgaaagatgaagatgtcaagatggatgacagctaatgaactggatgctcaatagttcatcaccttggtttttcctgaaaccatttcttgtccttgcctggtaaattgaatcacttgactttgttgcaatacctgacaggagtcaaatccctaaaatatccaggcagaagtaaattcttttagcatcacaaatcttctgctgtccaggcccgttaggccagtgggttaaggtgaaaaaagatgagaccacagtcatgttcatctggcacttgttggctcctttcacttagataaaaagtgctctagacatagatctcctcaccttgtcattggaagagggaatgaagtgagaattgcgtgtatcaacatgaatgaatttccactcttggaaaaataacttagacagtaagtccactcatgaatggccatttgtatcatcttggcttttaaagtatatttacagttttcttgtttattcatacagttgtcaaggcatatttgcatataaagtggcatgtaccctacatcttttctaaattgctaaaatagtccatataaacagaacaactaaataataccagttgattcctttttatgtaacatggtagcataaactttattaaaggaaatagtcttaacgaagattttgatatacctgatgtggcatcaacttcagttgtaaattacaaggaatcattgttattcattgyctataatattccttaaacaccaagctttattagtactaaatgtgaggcctttctggatatgcctatgccgactaaatgaagactataatgatcaatttaaaagttctttggttcataatcttgatgtaagaaaaaaaaaataatgtcttaaatctgagtggtgctttccaatttgcaaaagtgaatatattcctattatgttaaaatatataaaattattagattaatgcccatatttatagataagaaaataaagctcagagaaattggatgacttacctaagataatataattgtcagaactgggatttcattaatttaatattatttgtttagtttgtactacgtgctagttaccatgtataagacttcagaaatcttatggtctaatgagggaaagagtaattagatgaataattacacaaatgtataatcatctgtgttgataaatgtttcaaaggaagaatagagcatactctgaaagaaaatagagcacctgattcagaatgtggggcaggcaatgactgaatttaaggagtgacatgcagtctgagacctgaaagatgagcaggagacagcaggtgagtacgaggcaggggaggagccagagagtgctagataagtaggatgaagcttgctgaactggagagattgaagggaggccagtgtgaatgaggaggagagaataggtgatgagactgaaaagagaggcagggggcagctcagcagaatattgtgggctatgttatggaatttgaatttcttttaagtgacacagaaggtaggagaatggcatgatccaccttgaaccaggtattcagctgcaagttcagtggctatcaccaacatacatcatcattcttctggtggtgctcccaggaaatttttgttttctttatttatttgttgaatgtttaaatacaccattttcttatatacaatgagtaaatgagtatttgatctgttggctgccataactgatgagtcttgcaattttttttaaccttcgagaggacttaattttggccaagaaattaatataaggttctagaaaaactgtatttcattctctgtgagcttcagtaatgtgaaattcatcttatattttgagattttttttccttatgttaaacaagtggttgcatgatgcttttgatcaaaatggaatgaactgaccaaagaaggaattttttaaaaatatgggatgatacccttgactgattgtcagctttttctcttacttccattctcattcatcagccttagcagcctatatctagatgttgaacaagtattctgcccttgaagatggcctgacccttttagagtttctgtgtgtattttaaaggagaaaaatgtactcactttgaagttgtttgcttgaaaacaacctacacttctgtcctttgaattaattttctaaagtttttgagagacaggacatagagatgggattatccacataattttagttttcctgagggaatcaatttgtgtgccaaatggcattctgaggctggtacttaccaatcacctgaaaccaaaatccataataaatcttaacctttgaaaaaccttatggctttaaagaaattaaatggattttaaagatgwaagtattcaatttaatttcaacaatagttaatcatttatcactacaaacttttttttaatgcttatcaaactgctctacaatgtgccagtgatgaccagttcctaggcacttggaacttggctgacagatttttattatatttcctgagtcccatctttactgaggcatatttcaccggaatcattgacacaggcaatttcagttggtatcaagaaggtcctcatctttaaagaagagtggcctgtaggaattatgcattattttctacttgcttattcttttagtaaaacatagcttgcataaatccagtatggaaatagcttaataacaaacagtgctatgaagacattcatttttattttacttgaaacatcagtagtttcatgtatttgtatttaaaggacaacttgaatttttgtagggaaatacgctacatggtaaaagtaattttaattctcagtgttataattctgttttatttttcttttcttttctttttttttttattttttttttgagatagagttttactctgtcacccaggctggagtgcagtggtgcaagcatggctcactgaagcctcaacctcctgggctcaagcaatcctcccayctcagcctcccaaatagctgggaatacaggcacacaccaccacacctggctaattttttagttatttttcagagaccgggtctcaaactcctaagctcaagcaatcctctcagcttggcctcccaacgtgctgggattacagtgtgagccccaacccagcctataatgctgtttcttttgctgcttcctttttaagcttataaacaataatcgtttttaaaataatcattatatgtttgttgcaaaacactttgaagctgttgaagtttgtgatttcagtatttaaaaagtaagccccagaagttaaatctattaaagccttgtcaattcagggtttttaatctgactacactgcattatctttaggacaactgaaaaatcagttctcctgatgacttttttctgaatgttattgttttgttagttgaaaccatttacaaccatacattttccttcatgtttatcacagaagacaaaaggaactgataaatggaaaaacactacatggacttcaatataatcctcataggattgttattgttattattactattattgtttatttcaaaagacttttccttgttatcatattgtaagggagaggccctctttctcagggtgagctctcattggccagagtgactccattaggatatgcacaattgaattcccatgtattgtttccccttaaaatctatcttaaaatcttatttttagattggatatgaggattctagccaggtgttttccttttgcctctctgtcaaagatagttttctaaaggccatggcaatgggggagaggatgggaattggacactgagtacatctatattacctagcaccatttggttgacatttatgtgggagcacctctgttggcacctcctggttctggcttttaccatccgtaggacagtctgatctctgaatacacttctttcagtctttgaggcacagcacaggcactttgcaagcaatcccttctgcttgaagctaagccaggacagaatttctcacaatgtggccagtggacccttacatcagaatttcctggactgcttttgaaagtgttttctgtccgcctcccagatggaatgaatcagaatcacaaatgttgaaggattagtaatctgcatttttactaaatctccccaagtggttcttaggcaccctaaaggttgatgaccattgttatgtactgaatgtttatgtcctccctgatcccaaatttgtttgttgaagccataatcctcaatgtgataggattagcaggcaaggtctttgggaggtttaggtttagctgaagtcatgaaggtggggctccatgatgggattagtgtgcttataagacgagaaagagacacacgggcttcctctctgtctctcatgtgataaagcaagaaggcagccatctgcaagctagaaagagcagatcaggttagarcctgaccatactggcaccctgattttggacttcccagcctccagaactgtgagaattatatgtctgttatttaagccatctgatctatggcattttggtatagcagactgaacaaactaagataactagtatcctaggcaaaactacctgtatctggacatagctggagttaactttattcttgagggtgggaataaagacctggggtgcaaagaatgattactcagatgataagttctcgcaaatagttgtctaaatttttctactgctgtgactgttgccttttatcagctatctttgtaccgcctcttccttaccctttgagtatctctttccaccagctgcatttggtgcagaaaagttttcaaagcaccctcaggtgttggatttaaacttgtaagtgtcttcattcctcatttgcccttggctagccaagagactgattgttcaagactccttatgtttctgcagggttaactaaatttgctttaccattaaatttgagaataccatgtgacctcccagtacacattaaaattgacaacatccctttagtcttcaacataaaatcatgtcattatttttgagattccgcaaaattcatgaactgtcattgaattttctgaaattaaaacagcatgttaacaaatggcagtaaatgtgatttatggtgtaatacagctattcaacatatgctgtagcttttaattcttggttattactattagccagggaataactgcaaaatgctttagaaaaataaactaatagaagaatgttttatgtaaaataaaagtaccaaaagtgcaggtttctacattctgttgagaaggatagtcaygtggtttagcaaaatgaaagcctkcagctactctctcatccctttttgtaacagtagttttatactgaatctcttcttagtactatgactatgtttgatgacataatgtgtaagtctaggttaaacaatttttaaaaagtaggcaaacatattaattgtagtatagaaaaaagttgctattttaactcaactttatagtgttttattatgtatattggggtgtttttttgttggcttcatctgaatagagagtgagtttagatacagaatatatagataggtttaagtgtggcttaaatgaattcaaagaaaaggcatttacaatgagttgttaagacaagtaagacgatgtttgagtgcacattcctagctttataaaattgatatcataaaaccatcatttcttccagtatgtactattgtcattctagatcacaggcctgagtrgataagggatctagtccactatggcacttctttcttttctttctttatcttttctttttcttttttttttttttggaagatggcactatgttgcgtactaactcttggacaatgatctgagttctagtcatgattctgtccccaagcttraggcacactgagcttttggcacatagtaggtacacaataaatacttgaagatacatttttgcagttatataagtctgcacttatttattgatatggctttcacacttgaaaatgaaaatagaggatatattctaccaaactttcagagatttaaactcttaaaatgaaacagaaaacaagcttaacagctcaaatgtgtaacattcaagaaactaatttacttatagacatgttatttgcctataagagtttcagtttcagaggagccaagatggccgaataggaacagctccggtctacagctcccagtgtgagccatgcagaagacaggtgatttctgcatttccatctgaggtacygggttcatctyactagggagtgccagacagtgggtgcagcgcactgtgcaccagctgaagcagggcaaggcattgcctcactcaggaagcacaaggagtcagggacttccctttcctggtcaaggaaaggggtgacagacggcacctggaaaactgggccactcscacccaaatactggacttttccratgggcttagraaatggcataccaggagattatatcccacacatggctcagagtgtcctacgcccacggagtctctctcattgctagcacagcaatctgaggtcaaactgcaaggtggcgaggctgggggaggggcgcccgccattgcccaggcttgcttaggtaaacaaagcagccrggaagctcgaactgggtggagcccaccacagctcaaggaggcctgcctgcctctgtaggctccacctctgggggcagggcacagacaaacaaaaagacagctgtaacctctgcagacttaaatgtccctgtctgacagctttgagagcagtggttctcccagcactcagctggagatctgagaaagggcagactgccttctcaagtgggtccctgacccctgacccccaagcagcctaactgggaggcaccccccagtaggggcagactgacacctcacacggccgggtactcctctgagacaaaacttccaggggaacgatcagacagcagcattcgtggatcacgaaaatccgcggttctgcagccaccgctgctgatacccaggcaaacagggtctggagtggacctctagcaaactccaatagacctgcagctgagggtcctgtctgttagaaggaaagctaacaaacagaaaggacatccacaccaaaaacccatctgtacatcaccatcatcaaagaccaaaagtagataaaaccacaaagatggggaaaaaacagagcagaaaaactggaaactctaaaaagcagagcacctctcctcctccaaaggaacgcagttcctcaccagcaacagaacaaagctggacggagaatgactttgacgagttgagagaagaaggcttcagacgatcaaactactccgagctacaggaggaaattcaaaccaaaggcaaagaagttgaaaactttgaaaaaaattaagacgaatgcataactagaataaccaatacagagaagtgcttaaaggagctgatggagctgaaagccaaggctcgagaactatgtgaagaatgcagacgcctcaggagccgatgagatcaactggaagacagggtattagtgatggaagatgaaatgaatgaaatgaagcgagaagggaagtttagagaaaaaataataaaaagaaatgaacaaagcctccacgaaatatgggactatgtgaaaagaccaaatctgcgtctgattggtggacctgaaagtgacagggagaatggaaccaagttggaaaacactctgcaggatattatccaggagaacatccccaatctagcaaggcaggccaacattcagattcaggaaatacagagaatgccacaaagatactcctcgagaagagcaactccaagacacataattgtcagattcaccaaagttgaaatgaaggaaaaaatgttaagggcagccagagagaaagctcgggttaccctcaaagggaagcccatcagactaacagctgatctctcggcagaaactctacaagccagaagagagtgggggccaatattcaacattcttaaagaaaagaattttcaacccagaatttcatattcagccaaactaagcttcataagtgaaggagaaataaaatacttcacagacaagcaaatgctgagagattttgtcaccaccaggcctgccctamaagagctcctgaaggaagcagtaaacatggaaaggcacaaccggtaccagccgctgcaaaatcatgccaaaatataaagaccatcgagactaggaagaaactacatcaactaatgagcaaaataaccagctaacatcataatgacaggatcaaattcacatataacaatattaactttaaatgtaactggactaaatgctccaattaaaagacacagactggcaaattggataaagagtcaagacccatcagtgtgctgtattcaggaaacccatctcatgtgcagtgacacacataggctcaaaataaaaggatggaggaagatctaccaagcaaatggaaaacaaaaaaaggcaggggttgcaatcctagtctctgataaaacagactttaaaccaacaaagatcaaaagagacaaagaaggccattacataatggtaaagggatcaattcaacaagaagagctaactatcctaaatatatatgcacccaatacaggagcacccagattcataaagcaagtcctgagtgacctacaaagagacttagactcccacacaataataatgggagactttaacaccccactgtcaacattagacagatcaacgagacagaaagttaacaaggatacccaggaattgaactcagctctgcaccaagcagacctaatagacatctacagaactctccaccccaaatcaacagaatatacatttttttcagcatcacaccacacctattccaaaattgaccrcatagttggaagtaaagctctcctcagcaaatgtaaaagaacagaaattataacaaactatctctcagaccacagtgcgatcatactagaactcaggattaagaaactcactcaaaacctctcaactacatggaaactgaacaacctgctccttaatgactactgggtacataacgaaatgaaggcagaaataaagatgttctttgaaaccaacgagaacaaagacacaacataccagaatctctgggacacattcacagcagtgtgtagagggaaatttatagcactaaatgcccacaagagaaarcactaaaagcccaaaattgacaccctaacatcacaattaaaagaactagagaagcaagagcaaacacattcaaaagctagcagaaggcaagaaataactgaaatcagagcagaactgaagagacacaaaaaacccttcaaaaaattaatgaatccaggagctggttttttgaaaggatcaacaaaattgatagactgctagcaagactaataaagaaaaaaagaagaatcaaatagatgcaataaaaaatgataaaggggatatcaccaccaatccctcagaaatacaaactaccatcagagaatactacaaacacctctacataaataaactagaaaatctagaagaaatggataaattcctcgacagatacaccctccgaagactaaaccaggaagaagttgaatctctgaatagaccaataacaggatctgaaattgtggcaataatcaatagcttaccaaccaaaaagagtccaggaccagatggattcacagccgaattctaccagaggtacaaggaggaactggtaccattctttctgaaactattctaatcaatagaaaaagagggaatcctccctaactcattttatgaggccagcatcatcctgataccaaagccgggcagagacacaaccaaaaaagagaattttagaccaatatccttgatgaacattgatgcaaaaatcctcaataaaatactggcaaawcgaatccagcagcacatcaaaaagcttatccaccatgatcaagtgggattcatccctgggatgcaaggctggttcaatatacgcaaatcaacaaatgtaatccagcatataaacagaaccaaaaacaaaaaccacatgattatctcaatagatgcagaaaaggcctttgacaaaattcaacaacccttcatgctaaaaattctcaataaattaggtattgatgggatgtatctcaaaataataagagctatctatgacaaacccatagccaatatcatactgaatgggcaaaaactggaagaattccytttgaaaactggcacaagacagggatgccctctctcaccactccttttcaacatagtgttggaagttctggccagggcaattaggcatgagaaggaaataaagggtattcaattaggaaaagaagtcaaattgtctctgtttgcagatgacatgattatatatctagaaaaccccattgtctcagcccaaaatctccttaagctgataagcaacttcagcaaagtctcaggatacaaaatcaaagtacaaaaatcacaagcattcttatacaccaataacaraccaatagagagccaaatcatgagtgaactcccattcacaattgcttcaaagagaataaaatacttaggaatccaatttacaagggacgtgaaggacctcttcaaggagaactacaaaccactgctcagtgaaataaaagaggatacagacaaatggaagaacattccatcctcatggatgggaagaaaatatcatgaaaatggccatactgcccaaggtaatttacagattcaatgccatccccatcaagctaccaatgactttcttcacagaattggaaaaaactactttaaagttcatatggaaccaaaaaagagcccacatcaccaagtcaatcctaagccaaaagaacaaagctgaaggcatcacgctacctgacttcaaactatactacaaggctacagtaaccaaaacagcatggtactgctaccaaaacagagatatagatcaatggaacagaacagagccctcagaaataatgccacatatctacaactatctgatctttgatgaacctgagaaaaacaagcaatgggggaaaggattccctatttaataaacggtgctgggaaaactggttagccatatggagaaagctgaaactggatcccttccttacaccttatgcaaaaattaattcaattaatacaaaaattaaacattagacctaaaaccataaaaaccctagaagaaaacctaggcattaccattcaggacataggcatgggcaaggacttcatgtcyaaaacaccaaaagcaatggcaacaaaagccaaaattgacaaatgagatctaattaaactaaagagctactgcacagcaaaagaaactaccatcagagtgaacaggcaacctacaaaatgggagaaaattttcgcaacctactcatctgacaaagggctaatatccagaatctacaatgaactcaaacaaatttacaagaaaaaaacaaccccatcaaaaattgggcgaaggacatgaacagacacttctcaaaagaagacatttatgcagccaaaagacacatgaaaaaatgctcatcatcactggccatcagagaaacgcaaatcaaaaccacaatgagataccatctcacaccagttagaatggcaatcattaaaaagtcaggaaacaacaggtgctggagaggatgtggagaaataggaaacttttacactgttgttgggactgtaaactagttcaaccattgtggaagtcagtgtggcgattcctcagggatctagaactagaaataccatttgacccagccatcccattactgggtawatacccaaaggactataaatcatgctactataaagacacatgcacacgtatgtttattgtggcactattcacaatagcaaagacttggaaccaacccaaatgtccaacaatgatagactggattaagaaaatgtggcacatatacacaatggaacactatgcagccataaaaaatgatgagttcatgtcctttgtagggacatggatgaaattggaaatcatcattctcagtaaactatcgcaaggacaaaaaactaaacactgcatgttctcattcatagatgggaattgaacaatgagaacacatggacacaggaaggggaacatcacactctggggactgttgtggggtggggggaggtgggagggatagcattaggagatatacctaatgctaaatgacgagttaatgggtgcagcacaccagcatggcacatgtatacatatgtaactaacctgcacattgtgcacctgtaccctaaaacttaaagtataataataataaaaaaaagtttcagtttcctttttttaaccaatgtttaggtttttcatattgtaagttgtcaattgaagttacaactttttttcttggtaggttatcttattttacccagtcctttaacactattaagtaccattcctaaagcatagccttttgcaatattctgaggctattcatggtggaaactctggacttgaattgagaaatcttggtaatctgccgcttattagcttttgaccctgagcaagtcatttaatgtctctacaccttagatttcctcattgttagttaggtataacaatagtaataaggaaaataacactcattgagtttttgtgcattttaaagaagtatmtgtttggggccgggcatagtggctcatgcctgtaatcccagcactttgggaggccaaggtgggcagatcacaaggtcaggagattgagaccatcctggctagcatggtgaaaccctgtctctactaaaaatacaacaaattagccaggcatggtggtgtgcrtttttagtcccagctactcaggaggctgggcaggagaatcatttgaacccaggaggcggaggttgcagtgagccgaggtcaccccactgcactccagcctgggcaacagaatgggactgtgtctcgaaaaaaacaacaaaaaaagtacatgtttggatactcactttgtaaacgctgatgcagcaacagacaccaaacattatcccaagtggccttcccaaattttctgttttcaaactactatcctgaggaagagaggctctttgagagagttttggaatattgaggttttcatgacyaatggtcattcagcctcctttccttccttctttaattttaccacatatgagttagggaggaaagagccaatataatgggactgctaacagttcatgaaagccaaaagattccaaaaaatttattagtcactaaccaagaaggtgaagaaaataatttttaaaatcttatattcctatttttgcttaaaaagatacttccattggtatctcaagctgtatttcctgaagaatcatatacttttgggatgggtgccattagtggtcatgactgtgacctgacaaatagaaagataaaatgatccacagcttggagcctgccatgggcttagccacagttggtaggacacataagtataccaacactgtgaacacagttctgtaggtagcataccctcttctccactcacaaggctcccttcccccagtcaacaggaatgggcagtggggagaaacctgccattattagacactaatgacttcctgggaagtggatcaacaaagttttaaagcacagtacattttatttattggtttcttatttgccattgactttgactctttcctttctcatgtgcactttgatacatacataaaaatatatactttttttgtgacacaatgctaagggagtaattgaaacaaacttggcaacatcccattgctataaattcacccaggctgtctgccactggagaacatgaaatgactaattgaaggataaacaatgcttatctcaacctaagaaataataataataacagtgatgaccatattttaatatgaataacagtttctttagttttatgtaaaaatgaataaaataatttttagatatcctatatttattgactggtaacatggaatctaaacaaaagtgttatttttatgcaaatacagatttaagagagattgccttctctctccctgaacctctgctttgacacacacacacaaacacattatcttatatatggaaatmtggaaatccaccagccaccaaatttgcagctaggagagaaggcaaatttaggacctggaatgtggttgcttgttcaactcttgtgtacattgagttaaggtttaagctgctgtaccataaatgcagtctctctacctctcaactattcaagtgagcctactgagcccttgaaatgtggctgctctggattaacatatgttctgagtttaacatacacattgattgcagaaaygtagaatgaaaaaaagaatgcataatatctaaatatttttaatattgataacattttgaaatgataatattttggatgtattggctaaaccagatatgtaactgaagttaatttcacctttatttacttaatgtggcaatcataaattttaaaattacatatgtggcccctattatatttatcttagacagggtcacatctagataatggccagggacctagattaaactgcaatactatggataaagagaagaatggattgaagggacaactaatactctgcctcacttctgtatctctagtagtgtttgctcagtgtatcttaatttaacagctagttggattactgcatttggatcccaaattatgtcagactggaatgaggaccaaattaaacagagtgatgtagcatgtcctaaattttacccatacaattacaggattggaaaaacagctacggctatatgtttatttttaaaatagaagcttttcttttgtggtcagcttatgtgtcagttatatgatgtgactatcacaaaatctaattgcaggcttagactgcattaataaaatcttatttcaaagaccatatgacattctttacctactgtctactttgttgtgtttatatgtataagtggcttagtaggtttggtggcataaaataaatcatattttagaaggctcaactttagaatcatagtagagttggttgggggatctgttccatttgtaattcctgtaggctatcccttagagatgtttggaatacagttgtgtatatgggatgaagactaggagacagaaatgtgttgaaggcattgatgtgggaattgtctgcatctggatagcaagtaaaaccagatatgtagatgcattaatctaggaagaatgtgtagtcagagataagcactctcaacgttcagaggtagtttatcataaaaggagccaggaaaggggactgaggaaagcactaagagataggagtctataattccagatactttgaggctgaggcaggaagatcacttgagccgcaggagtctgaggctgtagtgtgctatgaccatgcctgtgaatagacactgcactccagcctgggcaacatagtgagatcccatctctaaagtaagggagagaatgaaggagggaaagaaagaaagagagagacaaggaagggaagggaaggaaggagagaaggagaaagacagaggaaaagaaagaaaaataaaagaggaaggaaggaaaggaaggaaggaagggcctgagtgcaggtaagcactcataaaataaaaaatcagtggtaaatcatgcaaatgtgttgtggcagctaaatgcaygtgtaaagaagatagtcctcagcagtgtcaaaaatactatgtggtctaggagtaaaggcttgagaagtttcttttaaagaaactttaaatgacaagagagttcttggtgtccttaaccagaacagtttcaatggactgatggagactgaggccagtgaacagtagattgagaagcaagaggaaatgaaatggagtcagtgagaggatataattcttacaaaacactttcctgtgacatactgctatcatgatctcttgatatgatgccttgagaaggacacagtgtcagctctgtggcrttcttactaaaaaatgtaagttttcaaaatttaataatgaataaatatcagacaaacccccaatgaagaagagtctaccaaataactgattagttattttcaaaggtgttgagatcatgactgggaaagagaaaggaattgctatggattataggagactaaggagaaatcacagttgcaatgtgggattctggactggatcctggaatagaaaattacattatgaaaaaactggtcagatccggaaaaggcctgtaatttaatatagtattgcactgatgataatttcctagttttgataattgtaccatggttatgcaatgtattagctttaggggaaccaggataaggggaatatgggaactctttgtagtacctggaaacttttctttaaatctaaaattagctaagaaaaaagaattgctctgaaaggaaggagagtgatgggggatggctggaaagaatatgaagctgaggagagctcaaaatcatttcaaaaagtgaaaatgattgctgatgttttccaagaggttatcatatgccagggaccatgctaagtgctttgtggaaactttttcattccctgttcgtaactatactatggatggaatgttgttgttattccacttttgtagatacagaaagggaaacatgacaggggccaaacatgatcacacagcggtaatggtagagctcggattttgaggctgatttcctaaggcactgcagtatgtgtcttttcaaaacaggagagaatttggtatatttaaatgcttgaaggatgggtgcattagatgaagagaatagaaaatacaaggaaaagaggagataggaaacaaagggtgaaatccagcaaatggtgaaataaatattgacattgcatctgtggtaatagttggggaagtttaagggatcagtagaaaggtaataactgtgtgtcatttatactggttggagattgagacagagtcttgctccgtcgcccaggctgaagtgcagtggcacaatctcagctcactgtaacctctgcctcccaggttcaagcagttcttctgcctcagcctcctgaggtagttgggactacaggtgtgtgccaccatgcccggctaatttttgtagtttttgcagagacaggctttcgccattttgcccaggctgctctcaaactcctggcctcaagcgatccgcccaccttggcctctcaaagttctatgattacaggcatgagccaccgtgccctaggatggtctttaatttctttgtgaagcagtggtgaggccttcagctcataggaggaagatggcagggttggaaatttgagagagcagaaagggtttaagcagccagtgtggagaaacagagagagagagaaagaactggtaaagaacatgtagaggatgtccaggctgtgctgagaatgaggtggcaagaccacacctatccgtggttttwctgtctcatatggttttctattatgtgatctctagttcatgacgtggactgttgaatttatccaaggttcagtttttgtcaggtgggtgccagaaaaataattgattaaggaagataaagatgttgttaagaaaaggtagaatggatagactcaaatctaaccaatggaaatgaggtgaagatagggtggtgctgaagaagtgacagcagtcagtatattgtttcaatttggatttctttgattagtagtgagtggtgaatgcttttcatatatttattagccatctatatttctcattttgtatatcatctgtaactatttttccaaaagataattttttgaggaatttgtaagaacagtttatgttttgaagatataatgtatttattcaataggtgtatttcaaatattttattttcagttttgtggtttgcatttttactttctttctagaagattttatttaaactgatagaaccacactgttcaaaaaatagccattaacaagtggctatgaaatttaaatgtaatttgaattgtttaaatgaaataaaattcctaaaatgaaataaaattaaaaatttagttaggaagtcttactagctaaatttcaagcatccagtagttatgtgtgggtagaagctactgtattagacagtgtacctataaaatttttccatcattgctgaaggttatattgctataactctgctatggaattttttttttaattgraaaagctgatattgctttctttttattgatggttkccttcggattcatgcttagaaaggtcttttccattccccaacatgatataaatgtgactttttatttcctactagtatttctatagttttttwaaaaaatctatttacattgttaatatttctagaatgtattttgttgtattgaacgagctaaggtcttactcatattttacaaattttaacataaattccaataaaattaaatgaagtcgaaatggcatctttaacatttaatgaatacttaaatattcatagtttatttattgaatatttattatattacattgatttgttagaattagtttcgctttgatgaatatttatcaaagagattaatatgatgaagactaagacacgattacttcccccatgaaattcatagtttagcagagaggcaatagacacaacaaatatttacaatgctttgtgagtgtatttgtaggaatgtgaaaatgagtccaatgtggtttcaaaggttattaaagtggctctatatctgggaagttgtgagattagggttaatgtggagtttgcgcgtgcacgtgtgtgtgtgtgtgtgtgtgtrtgtgtgtctgtctgaataggaagggagtgagaaaggggagagtgaggggacgataatatgataaactatggtgaaactaaattgtgaaatattttgtgtgtgactctcttgcttgtttgccatccaaagatttgttctctgggaagacagatctcctgttcagttaaggatcaattgctggctgggtagacacagaaacgggagatccctcagatggccgccctagttgcagttcaggtgagagctgaagggggcctgaactggggtattagcagtgggatggattagagagactctcagaaggtggaagtgacaggggttggtaataattgratttggaaggaatccctaattgattgatattccaaggtatacctgtagactgaagtatgcctccagttctgccaagaatgaatgggtttgctgacatgggacagctgagtattaggcaatgagtcattcaccttactactatcatttccttgtcaaagttttaataattagatgtgatatccttatgtttgaacatagctggaatttagcatagaagagaatcttaatgctagagaaaaattacttaccttggttcatcacagtgccaagattaattctggtaagagtgatgtggttacaacttttaaaattttaaatgtatgactcagagcattttcgcttttacagattttatctgaggcagactgaataaaccaggaaaaataaaattattatagctgaaagatttgacatttgattttttttattgcattgagggtctaaaccttaatttaatgacagtaagcaagaagaggttatccttgtctcctgcaattatatcttctggttttccttcctggaaaatatttaacagaacagttgattttattcacttaaagaagataatcaaacccttagccaataccacagaaaattaaatttagatttaacgggttttagggcatgcttttactaaatatytcaagttacgtttcctaagatttatggaatgaaaatatctcgtctagaagccaattttattgtttgactggtacaaatgagacatttctgttaatattacatttgactaatatatgttctattaagatrttaaagagtcacagttttcttagaagattccttttcctttaccatcttcctttttatccagttggaaacaaatcctttaataattttttgtttaatttcactgttcctgctgttcacaaaaagagtcaaagaagtttaagacttatgtgcaataattcactagttgaatgtcctttgattctaagtgttgtttttttaattccataaggyttgcaaaaatttttgtttgctgtggtatttactatagtttgggaaaataaagtgtgtccagaggaaatttttaaaaatagaaaatctaacgatgtaactatacagaatgaatgtatgatattttcattttatccttttaaaaggacattttacttacctcagtgaaattaattctttttcattgaggtgggttattgactcataaaacagcaatgctcaaacgacctccctttcarccactcccctcaaatgtctgcttctgaaaatcaattgctcaaaactgatgatagcaaaagtggttaggatgtgtttagaggatgataaatgatagggaaggacttttcgtaaatatgcaacctacaggatactttctaaatttactggtaactgtacatcgataatcctcagtaaataaactgaaccttacaaatgaatcagacaagcaagaactcatcacccctcaagtaaattatttctaagggaactggtaaatattttgaaaatatttaaatggatatttatgacattgattaagtgaagccccatgcatattctccatagtatcattttattgtaattccttcactgtactagaaggagctaaatagtaaatattacacagcctactctaggttgtttagatattaaaatagcaagaaattataagatataaggaatattcaccaaaggtagtgaaggtaggtattaatggagacaaaattcagttgtattccaaattctgccccttgtcaaaaatatagaagtaatccagttagtaaccatacatttttatgaacaccattttaaagaaaaatagaaatgaagaaaaggagccataaatgtgtggaaacaattgaagtgtatataaatcaatgttgaacttttcatcatattagattcatagcatgagaaattgatattagatattaaggatttttaaaggagtataataatgtggttatatttcataagagtctttatttcttaaagatatataatgaaatattacaaatgaaataatgatgtttgggattttcttcaaacaaaayataatggaagcgtgaatagaaggactatggataaaaaagattgcccatgagttgataatttgtgcaactgggtgatgaatccattgagatttgtcatactatttgtgtacctctgtatatgcttgaaattatacgctacactaccacacacacacacacacacacacacacacacacaaaatcatatactatctcacattaggtagcaaacagcaagacacagttaccatcccatctgaagaacatagctactaccagaaaccatcatcatcatcatcatcatgacatttaatcattacaccaaatccatttaggtgattacattactcttatttttcagaagaggaaactaggacttagagatattaacaatcttttccaaggttagatatatattgaatatcagaactggtgattttaaggtctatttactttcctacattatgggtacacttgctagagtttagtattctgggttgcctgtggacattgtacaaggatgtgtgaaaataaattaaaactacytaaatgataacaaactatttattcagagtttgttatagttccacataccatcacttgcacttttcagagattcagagataggcaggagggtggtaaagccttatattgaatttaaaaaagcaaagatactatacatgctctgataggacattcttggcatgggaaagctggaggtaagccatctggaagtggggcatcttacgtgtttggtttgggatgcatatttggatttttcttttggccctgagttgagastagggacaaawtgtagggaagctgtctgaagcctgcagactgtggtttggtttyccaggctcattgctgtggagattgtgcattagagtgctattttcatatattgtgactatatatatatatataaaaatctggcctttgtgtatttgtatgtttagtctcagtctcacctttgcatcattctcatggaaggcttaagaccttcaccatttacggattgttcagttgtacatatagtcatcatttcccaagatcttgacctttttgttgtgttatcatcatggctatcatctgataagagagtggctgcacagaagtatctaagactctagatagcatgcaacagatcagcatcatgagcactatgacaaaaagaagaatagtttatagtccttataagatgttttgggtccaagaacctaaattgcccaattcaggctgtgagaaaaatttctacagggcatgaggatcaccttagagatttaggtagctttttcataaggtagcatatagcctgtactaccttgcctgttttattaattcatgtacagcaagaagtattactattggcacagattccaccatggctagccaacaagaaattagagcaatgatattatgcattactactgctgatgagttaagactgatgtgtattacatctagggcagagttggtactgttaataacttctgttagagttaatgttaaatttcttagtcttttctatgtataygatttctggtgttgggaacactgttctgattattcatataaacaatgagtcagtaattctccctgatagaatgcttcaaaggtggcctcattttggaacttgtatttgagtcagaatttccagccttgatgatttatagaatcagggcctctgtgtaccaaaaagacttgaggtgttagcctgaggcagatgagaccaggaatttttgtcacgaactggacagccatggacaaaaagaattattcatgacatgaggttggaaccaaggcctcacattagctgagtttacctatttgaatctctattactgtcttcctggcatcaagtaattggcccattgtccagtgaagattatggaattcaaatttagaattatatagagtctgataaacaggcagtaagaattggttctttttctggtatagagagacaacagcaaagtyttaggttgatttgtttaaagtcatttgtccatgtaggtacaagtggaaatgtcactgattataatttgctggggtatcatttgatgagactaggattgctcagaggttttttatcaggggttctggttctggttgacctatacagcagtctgtaatattgagggcagtggcttatttttgaaaaaaaaaatataagaatggcattagaatgagtatgttctgacttaattataatagacaaaaaaaaaagagaaaaagaaccattattagtggatgacaatcagagctctatggaaaataagragagtggtaacaggtaagaagattgaaaaacaaacaagaatgcaggggttttaggttggatgtattgggtgcaagctgtctactgtccaagatcatctttttctggaggttttggatcagccatctgcttctgaagaccaactatttctataatatctctaagaattctgtttaagtttttctgttggagtagccttccagttgtatagaatattgaattgcttctttagttatgaaacatgaatccaaggattgatctctggagtttcaatgatgtatttgttgttaaaagtatctgataaggtcccttacaggggaggttcaagaacagttttttctaatgtctgttctaataatcaggatctcctgttgaagatcataaagaggctgtgtaggaaaggattgtaaacaagttaagaagtcaatcttaacttattggtgataaaactgagtatactacatgagcctcttttgctattttgtcatatttttgtgtagcagggtagtctaatactgtaggtggtgtccataaatgaaggggccttccagttaccagttcatagatagataaccagtaattctctgagcaggtggaccatatggccataagtgctggtggaaataactttggcctcccaaaggaggctcacgtccttcagaaagcttgctaattttaatgatgctagtggttcttgcaacttttctagaaaattgtgagtaataaaggcagtgtcatttttgagtaagggacaatgcattacaaatttcttttacaatggctcccataaaacatgagccttggttacttgttataaaagttggtatgccccaaattagaaatgcattatcaaggagctttgtactgattgtgaaggctgtagcttttcagcaaggaaatgtttcaaccgatcctgaaaataggcatacaagtttcatggagaatggaaattggacaaaacctatctgagggtgttaagggttcttgaggtttcacatccacctttatagtttytccaagatgctgttgggttgacaggtgacacatgatctaaaaatagcctcatcagtccataaatcttccccaccaatgatgatttaagatagtaaccaatttgtctgtaccatgatgagtagttttatagagaaattttgttcatatccattggaagttattcatgtctccagtgtcctcattgggggtgccagagatgatctgtgtgaaatgtgcaaccagagtttttccattcttcctttttaggactttttaggaacttaacattgatatttcataacggcctttttgaatatttcaagggatttattctttgagagtttaattaggctcataaccttggtgaagcctgcttattggcagaatgatctgctatagcattttccccaaactttcatactatcagtttttgtatgggcttcaacctttgtaatagtcacctccctaggaagcatctaaaagtttctttttttaaacttttaagttcaggggtacatgcgtaggttatataggtaaacctgggtcataggggtttgttgtacagattatttcatcacccaggtattaagcttagttccctttagttatttttatagatcctctcactcctcccaccctacaacccctggtaggcataaaaacacatacaggtaaatgttcactgcagcactattcacaatagcaaagctatgaaatcaacctaaatgcccattggtggtagactgcataaaagtttcctgtctgtttttgatggaagttccagcagagatgagaaacctccttggttgcaaagcatcccaaagtcatgtactactgcaaaagcatacctgctctatgtatgcatgtttactttctagggttttgttagattgtaagctctagtaagcataatacgttctgccacctgagctgatggtacctcagttggaggagtatagagtgtcctcccttggtatctgctggggattagtttcaggactcctcctacagataccaaaattcaagtacactcaactttcctatataaaatgtaatatttgcatataatctacacatatcctcctgtatgcagtcatgggccacataacaatgttttggtcaatgacggacttcatttgcaacagtgataccctaagattataataccatacttttactgtacctctcctatgtacttaccattgtgttacaattacttatactattcagtatagtaacatgttgtatatctttacagcctaggagcgctagggtgtaccacatagcctagttgtgtagtaagctataccacctaggtttgtgtaagtacagtctgtaatgttcgcacaatgataaaattatctaacaatgcatttctcataaagtatccccctcattaattaatgcatgactatactttaaatcatctcatgattgcttaaaatacctaatatatgtaaatgctatgcaaatggttgtttactgtattttttatttgtattattttttctaatttttttaaaaagctatttgtataaatttatggggtacaagtgtaatttggttacatggatatattgcatagtggcgaactcagggtttttagtgtatccttcaccagaataatgcatattgtacctattaagtaacttttcatcttcacccctctcacccctccacccttcaaaatcttcgttgcctatcatttcttctaagaactggaacaatacaaatatgcccactttcaccactcctattcaatatagtactggaggtcctagccacagcaattaggcaagaagaaagaaaagacattcaaactrgaaaaaaaaggatgccaaattatccctattcactgatgatataatcttacatctagaaaaccctgaagactctaccaaaaaactagatttgataaatgaatccagtaaagtttcagggtacaaaatcaacaaataaaaataagtaaactttgtatacaccaataatcatctagctgagaatcaaatcaagaaggtaaccccatttattatagccacagaaaacctcaaaatacctaggaatatatttaaccaaggaagtgaacgatgtctacaaggaaaactacaaaacactaatgaataaattgtagatgacattaaaaaatggaacaacatcctattctcatgattcagaagaattaatgtcattaaaatgaccatactacccaaaactatatattcaatgcacttcctaccaaaataccagtgtcttttttcatgaaattagaaaaaaaatcctaaaacctgtatgaaaccaaagaaaaaaaaaatcccgaatacccaaagcaagcaaaaagaacaaagcaggaggtatcacattacctgaattcaaattatactacaaagctatagtaaccaaaacggcatggtaccagtataaaaacagacatatagatcaatgaacagaatagagtagccagaaataaagccacatacttacagccaatcaatctttgacaaagtctacaagaacatacattgggaatgaacacgcttttccataaatgatgctgggaaaattggatagccatacgcagaagaatgaaactgggcctctatctctcaccatatacaaatatcaactcaagatgggttaaagacttaaatgtgagacctgatactataacaatacttgaagaaaacctagggaaaactctcctgaatattttctatctgtggttggtggaattcttggttgaggagcctacagatgtggagggccaagtgtactctaaaggagaccttaaattagtgagggataacatatcctgtttgataacctcaagtttctgttttgagacatccgccaacaaatcatattaggtgagagtttccaatgggaatctctaacaaatctgagtgaggtacataaagttccttcacttaggtaagataattgtaaagtttcccttcttttggtaggagcaggagagtgggaggacttagggtactgtagtggtgaattttagtaatgtgggagggagacagtaacagagtctcataagaggttaaccaactggctgaaaagcattgtttgctcttagtcagtagtaatgtctgtactgtgtaaggaaccatgaagtcaagtggggagctaagaactaattcagcagaagcattgacaatttttgcagcagtggctattgtcctgagacaaggaggctaagtctgtgcaaccgggtcatgggtgcagttatagtaagcagtgtgtttctgatgcttctcttgaatttgagtttaaacctcaacctgtccagattactcatgcacaaatagataaaagagctttttgtagttaagggtacttagagaaggtgaggctcttaaagagccttctttggattacagaagccctgttcatgtttttcctcttagaggagagtatcttttattgaagccctagtcaattcataaagagatgttgcaatcccagaaaagtttggcactcattatcttcagtatcaattaaacttagaatttctctaagttgtcatttattagagggccaggacaagttgaattgtctttataatgagagtatgttttcccctttatacataggtcataccctaaataattgactctattttgacataattgtaatttattttttgaaatgttatgtccttttctgctaagactgagagtaagtggaattcctcttacaggctttgttgtcctgtgaacaaagtaagagattatctacatactgtatcaaaactgaatcagaagggaaacctatgtcttttaagtyttatttgagaatctaggaaaataggagggtctttagtgaacccctaaggcatgactgtcagagtatattgttgcactccccaggtgaaggtataaaggcattgacttcactacagacactctgaaaagggcagagcagagatctgtcccagtgcagcaagtggctggcatttggaattgatgagaggatggtagttaggttacattctatggggaaattaaggataataattttgtggatggccctgaggtcttgaacaaatcaatattctcacttctttggtttctttactggcagaacgggagtgttacaaaggctagtgtagagtatgggmaggtctttgatataaggcttttatctataggtttaagtccttcctttgcttttggatattgggggagtttggataactgtctggtagaatctgtctgaagtttaatagatttccctctaattatttttcctatatcagcagaaattttagcccatgcaatgtcaggtaaaatgttgtggtaagcagaataatagcccctcaaagatgttcacctcctactgaccagaaactatgtcatcctatatgtcaagggggttcagtttgtagatggaattaagattgctaattagttgacttttacattatccaggtgggcccaatataatcacagtggtccttataagtagaagaagaaggcttgtgttagagagatttcaagatgccccactgcttcttttgaaagtggaggaagaggccatgagccatggaatttaggtggcttttaaaagataaaatacgcaagggaacagattctccctgtgagattctaggactaatgcaactctggtgactcttgattttagcccagttagacccattttgcacttatgacctacagaactgtaaaataataaatatgtgttgttttaagccactatgtttgtggtaatttgttacagcttcaataggaaactaatccatatatcaggagctttatctgtggtaggcatcaaatgtaatggaggaggcaaagayataccagagcagacacaatttgataatgaatagaggaggactctggaacctcaagaaatagttcttctggtttgcatttcatactacagtttaatttgcaaagtaagtcacttcctattaaaatttcagggattttatcacagagaaggaaggaatgttttttactcaagagcccaaggattacagttaaagattgagatataggaacaatctgtgcattatttgaaaaacctaccacctatgttgtatgtttgctctaaggaagaggctgaacaaaggtaacagggtgtaatgaagacagagtagctcttgtacctgccagcaggttgaccatctatattacagttaattcatcttgagtgtttacagtaaggtaggatattgggtgctttttctttcttcagattaccctcacagatctgaattgagagatttttctttgacttggtgtttattttgcatgatgggacaatccttttttccagtgtctcttctgtttttaatacttgcaagtatccttttcggtaggtgatgggtcagaaagtgagctacctagctgtttgatctgcaggtctcttaagtttattttgggtcttgtcttgtttgggttctgaagccctttaaaaatgttctgtatgatattgtaactcaggtaaaagagtctacttcttatgctaatttctgtttctaaattgagtctccaatttcacatgtaatccattgacaaatatcctatagtgtcatgttttctctgtttgcatgattgaattatagcccaatctatttttactgtagctgtttcaggactaggatatttttttctaccctgaggtttattgtggaaagagggatcatctaggtctcctttttgagtcattccggtccatttttgtcatttaggatttagtgtctgaggttccaaccaacatacatttaagttgtcataggtcaagtatctatgggttgtaggcactcaaaatagtctaaattattccatgagtacgtgctagtcttgtgtggagttaggaaaatccttaattatagcttttaattcagctcagatctgaggcctaaattctagaattgcctacatgcctgggaccacttgggactaggacggatgggtctttagaggcaactgggattttagggttttaggagaatcatttggaaaatgtagggagtccagacaaggagaagtgaagggaggagatgatggaagagtggcaggagagataatataatgaagggggaagaggsaaaagggaaacctggatataaggaggcaactgaaggactaggaaaacagggatttactagggraatgcatctcgcttgatttttaagtttgtcaaaccgagggttagcctagaccaaagcatcttttagtgaagaagttttagtgaagaaatcagaatttcatttggagacctctgcacaagagaaaaacgctgctccttaggcctgagaaatcttattccttttttttcctaaggcacctctcaaatgaacattttttttcaagtcgaagtagcctttggtctcaatatttttttttgtgaacttgtgccatttagagagctatgctcaagagttacgactgcaatgacagtacataaaagaagcagaagtttttcttggaggagaagacctagtcttaacctcatgagacctgccaaaacttagtcaaaagtaatgcttgtgtacttcatgtctcaggtcctcaacaagtcagctgcctataaatgcagacctgacaatgtatatcccctggtagtgagaggtgacaacatgctagcagccctcrctcactctcggttccttgttggcctcggcgtcygctctggccgcgctcgaggagcccttcagcccaccgctgagctgtgggggcccctctctggggctggccgaggccagagccggctccctctgctcrcggggaggtgtggagggagacgcgcgggtgggagctggggcttacgggtggccaccggcgcggttccgggtaggcgcgggctccgcaagccccgcactcagcggcacagccggcaggcacctgctgggcttgactggggggcgagctccctctgggctgccagagtggcyggctaggtgccgcaaagtcccgcgaygcatgccagtgacaggtgaagccggctgggtttctgggatgggtggggacttggagaacttttctgtttagctaaaggattgtaaacgtaccaatcagcactctgtgtctagccaaagstttgtaaatgcaccaatcagcactctgtcaaaacggaccaatcagctctmtgtaaaatggaccaatcagcaggatgtgggtggggccagataggggaataaaagcaggccagctgcgcaagcagccacaatgcactcgggtcctcttctggactttggaggttttgttctttcgctctttgcaataaatcttcctgctgctcactctgtgtccgtgccagctttctgagctgtaacactcatggcaaaggtctgcagcttcactcctgaaggccgcgagaccacgaacccactggaaggaaggaacaactccagatgcgcygcctttaagagctgtagcactcaccgggaaggtctgcagcttcactcctgaagtcagcgagaccacraacccaccggaaggaataaactctggacacatctgaacatctgaaggaacaaactccgggtgcaccatctttaagaactttaacactcaccacgagggtctgcgacttcgttcttgaagtcagcaagaccaagaacccaccaattctggacacagtaggctgaacatcagggacaaaactcttgtctgaatcaaagcaaaacttcaggaccccaaaaacaaaatagaatagaaaaaagacctcgtccagttttgttggtgactcacagcaaagtttgtacaaatggaaactggtctggagagaaccgaaagtctgtgagaccrgctcaaactataggcttataggactcatgcctgtgctctaccctgggattctcattctaatgataaacgctttcagacagtccgacacagaagaatgaaataaagcaaagagggtgagtaggaaaggcctgccaaggatgtcaaacaaatgggagacaataacaaaacttgggtaccaaacagaataaacagccaagggactcagtgaaaagatagctgagttcagacctcatgctgactttccacatctgcatggatgcaagccacaagcagcaagctgtaagaggtatccatgggtactgcacctgattgaaacctagggacagaaacagtgggtggtgcagaccatgtctcagtggaacctctagtaatactgggggaataacaaagactattcaaagcagaataagtggaggtattcacacacagcttgctacagcaagggaatcagccaccatcacttgcctaattccaagacaggcagggggatgcggaagctttgttcaacaaatacatacatgttaaatagttccagktgtgctctgattggacattattgccatggggaagctgaaggtaggctaaccagaggtggggcatcttatgtgatgggtttgggggatcatttttggcttttttggattggtcccaagttgaaagcagagtggagacaaaaaatagggaagctgacagtcattaagaaggtcaagtcctgacctttctgagccaatttctttaggagttacggtttggctttctaggcgtattattatagggatcatgagttagagttctattactatttatgggctgaccattgggaytggtatactcagcatctcagatggaaggaaagtgtcagaataggttcatggagaatatygagtggtaagaggaccacagtctgggcaagaaatttcaccctgctgttgatttatttatttggaggggagggtgcagtttctggtagaatagtttctagcagagcaagatagagttggttaagattctgaaagtcctacaaattattaacaagcctcagcataggtagagtaagtcataacagaagctagatgtagttaattccatctcatatcctttgttataaacatacagaggcataccaactaccacaaccaagttgctgtaatcagccgtaaagaaaggggcactatttgtagttcaggctgtamtgttttcagcttgtagcacatccttaatgaggataaaatgcaggtgtcttcgttgaatggatcttgaagtggaattataactagattttctttaagctgcatctgttagataaaggtggaagcagggagaaggatgcagagaagagacaggagaggagggagctctcaagccaggtttttcacacagaaagttctgcggtcaataggttaatggcaaaatgtttacttcaactggctgcctgacctggccaattatggcagaagaataaacaaaggaatgagacaatgaagcgggatagagttggaggggatttgtagaaaataaaatgattgtgtgcagtcatttcagtatatcttggttatgtttggaatatttggaaagataacgaaaagaagtgatcctgctaagtaagagctttccttaaagtagtagagataagggaaaaaagctaagctgccagacagctgcagggaaagccaaggggctggtgaatcaggccaatggaatacaacattgataagagctgtaattgcaaaagtgcagactgagaggacagttargagaggagattgaaatcagttttagaagagagagtgcatccctttgataattacccttctgcatcttttgtgattagtgtacaagcaatggtaagttaactattccatttttaaaatctgaccattaaaacaaaagaaaaggtactcaatcagtcagggacttgcattaagtcatgataatagtattagtgacgatttactatgtgccaggcatactgccttaaacttagcactttaaacacatgatctctcatttaatcctatgaggcaggtgtatccttaacactatgttatagagcaagacagttaggtttaacgagaataaatactctgcccaagtaagtggtgaacaacttaaattcatggctgtttgatactggggctggagttcttgaccattgtagtcagcacccttgcttagagataattaaggactttgtttacttggtttgtggagtcatagaacaatgcttaaatctcacaataactagaatgtgcaggactggaagaaaggcaaagatcatctctgaggatgtggaagaatgtaagctctgattatagaatttatgaaaacattgataataagacagctaaccatgagactcaaactacctataattttttttgactttgatttatatttgaaaagagaaccttgcttctcattacctttctatataagtatatacgtttatgattagagttccctcctctcaactaagtgctggaggctgtgtaagtagttttgtattttgaaagaattaaactagacatcttagggagagtatccatggagctacccgcagtctgtgcccacacatacctgtgatgttactcaataaaccaatattgccacctgctggtagcttctctgaacttcagacacaaggttccaaagtccttactagtaaaggatgtgttttaaagggaaatgaaatcatgacacccaaaacatttacaatgaaaagccagaataatttggggcctcacaggcaccaagagaatcactaatttattcaaagatgattttcatttacgaatagataagtgactatttggaaactgatctctttgacctgcctctgttaaatcagcctccatctcactttcaaggtcagtaaatcctgctaagaacgacctgtacatttatgcctgttcaccaggtttgtggcccacagtctattagcttatttatatgatgctgtgattatgtgaatgaacaccatttccttgaaccaagtggtcattgtctccatgatattctcagtgcattttgacctttgtgcttccaaaggatgaagatttttctttyctaatttaaaactttaattttgtggttttattccagtttgtggcatggcttctagtgattctgccwtttatgctgcagctcttaaggaaaataggcatggttaggataatgtgttctgatggagtattctggaaggccaaacgaagaggctggccagaaaaatcacaggtgtggggttcactcaaaagttcttctaacttattccacttatcaaaatgcccttcaggctcaactatgttatttcaaatgacaggagctcctttttttttaaggctgaatatcattcccttgtgtatatatgccacgttttctttatccattcatccattgatgaacacttaggttagtaaaataagccaggcacagaaagacaaatactgaacaatctcacttttatgtggaatcttaaaaagttgagttcatagaagcaggaagttagaatagtgattaccagagtctgggagaagggagattgggaacatattagccaaaggatacaaagttagatatggagaagtaagttcaaaacatctatagtacatcaccctgactacagttagaagccatatattgtatactagaaaattgccaagagaatagagcatattttaagtgttctaaccacaaaaaagacatacatatgtgaggtaacgcatgtgtgaaatagcttcatttagccattccacaatgtatgaaataccaaaacatcattttgtacaccataaatatatagtttttatttgctaattttaaaaagtgcttctaacataacaagggaaacgtagagctatcactgttcttcagaatattgcatcagtaatatagtgacacattacttatgttagttaaataaaccattaggcaactcacttgctggcagtccaatgtgagcaatgttgatgtttaactctttttattaatagttccttgtatagttgagaaagtgtacaaagcaataaaatctgactcgaagcaaaggagacagacaacccactatggcctctcttccctctgcaactagtcgctctgaaagggtgagccctctctacttaccttcttactatgagaggggaccccttccgaatattttgtttgctgactctctccctctccctcccctctgcattgtaaatatttacatatttttatttttaaccaacatgcattacaataactaatacatacgtattatagaaaattatataatacagaaaagaaaatatttaattaataagctattaaataccagccacatagtaatactattttggtgccctctgcaaacataagcatatcatcattttcattttacccaaaataaattataagaaaaatactattcattaaacttgttgtttctgatatagcaatatatcaacaacaacctttaagttaataattatagatctagatcataaatttttatggtcacaaagcattccattatatacatgttcattattgttggttgctttaatagacgtcacctctacccctaattaagatatgtttctacaagtggcattgcggcatgaagcatatacacatttttaaagtttttttaaatgttggcaaatggttatctagagaatgggaatcaacttatactatcactagcagtatataggacattagtaggtgaaaaataggtgttatarcatggctttgatttgtatttgtttgatacaagggaggttaacacttttcgtatgcatattggttgattgtgtttcctcttttttgaatatcctatttataagcttggccatttagattttaaaaatttatttcaaatatttctcatttttcttatttattttaagcagctttttccatatacaatattacatgtttattcatcagatattacaaatatttattcaagatatttatttgctttttaatagtactaataatacatggctttaaaaatattttacaagttttatatttttattcagttaaacatattaatcattctttttaaggcttctgactaatattattccttaaaagtctttctcaaggcagggaaatattagcgctctattttcttttaaacactttattttaaacgttaattaatctagaatttattttggtgtacatttgagaaaaggattgaacactttttctccccaaattattggctgggataccacataaaggatcctagagggctggatattctttgaaacttcatgccctccaagtggcacagttgggatgatgtgagctgcaagctcagaggctggtcaaagaaacaaattagygtgtagcaagagagaccaacctctaactcactaatgttctacatttctttttcattgaatataagaagaatcactattgatgaactagggcatggctgcattacagttataaatatttaaatgggaaaaatggggggaaagtctactgaaggcagcactttcatagtacaggagtgagaaggaagcctgatgggtgtgcagatggacttctgaagggagcgtagactgcattaggaaggacactttgatgaatgatagaggctggtctccttcctgggtctgtacaaagcaatgcattaggatatgatgagattcgtagagcttgtggtttttaaggaaccacaaagtaatttggcaaggtagaatattttcatcagcattcatcattattaatatcattgtcattttaaaaaaaacttgaaagttagagcttgtgttggaggataaccatgtcatcatacttgaaaaaagaggatgtatacactttctgattttgtaaagtaagttgattattcctattctaactatcttctgaaaaggtaattggaactcatcagctccttttcctggcttcagtctccttgggatgagaaggaggagattactggattctgaagttttgtgctgatttgcctcaaatccaggcctgtmtcatccaggttcttagaagtctcaatgagctaagtaaacccaacttagagggagcaaactggacaggtgaggaggcatagcaaaggtattagtaataattgctgttattatagcaacaacatgaaccacatttatagaatgcctgccacacttcagccactatttcttgtactctrtgagcagtacttcggttactaatagctgagtgccccagctggggaatctgctttctacagtccagggatggaggaagaaggaatggaggtactatctttggaatgaattttctaggtacaaggagggattcttgatacttaatctatcctgtgttcctgtgtgccaagctgagaatcaaagaggttgtttaaaatcggttgtctgaccttactcataaatatcatcatgtctacattattgttagtgtattttaaatgattgctgcttgtctcttacatccatcctactaatcttcatcagaccaacatgctcctcactactgattggtatttgccatcttcttatttgtctcacgtgggatgtttgttgaaaatrgagattcctgagcgtgccttcagttttagtaccaggtgtttccactaaatgctggagtggtacttctccaattatcagtgtgttcaagaatcctatggggatcttgtcaaaatgcagaatctgattcaagaggttggagtgggccctgagaatctgcatttctatcttttcccagatgatgttgatgctgctggtccatagatcacacttcgggcagcaagagatgagagtgtctacactagttactatggcattttagtccctctatgtctttggcccattttcaactccccaaatgacttctccaagctccttatataatgtctctgaggcagtcaaaccaggctctggagtgttctccaatagtgctacctaggttctgccttggaacttttgctccaagttattatcactgttgttctttctgatccacattcgttgaacacagacacttcttgggagactttcccagtctcatctcataggtaaggctttttccaacagccccagccctctaatggttcctgctctctgacctcctgtgcaaatgccagtcatctgtcctcagtgatgtgtcaggagcagcaagtcccagaacttcactcttggacgtatgagaagttyagtttagtaaaacgtcttgttgaaggaaactgtcccattttcccttttgattttctacamaggcccgctactaggcaagagccaaggctgacatggagacagctcagccctatttcaaaagctgaaactctctttactatcccactggatgcacaggatgctctcactggcccatccctgtcattatctcagatatgtgctgatgattcagaatgatcctgggtgtggccttaaggacatgttgaagcacccctatcactatgaggtggccatggccatgtcttcctcccttctctaaatgtaaagaaaaatatttgtatttttacctagtttttctttgccttagacttctggactatttcatctggatctgtaatttttgcccatcaggactctccttgatgtctttgttctatcttggtaaaatgcaaacgttgaagccttttttcttaatcctgagttatacactttgaatctgctttggggcattctctttgcccctatgaaggtaatgcacactacacaatggaaaaaaaaatgctctraggtattaatcccaatataatggaagacaagttgaagacactggacttggcaacgtgtaaatatgggaaagaattctgagactttctttagtgcrgaattcagagcatcttgatgtcatttggcccttctcttagaggcgttctcttcttgcagttttcctggggttgtaaacttatccccaaataagacaatctcaaatcatttttcaaatactatcagttcaatatttgttgtctccatcttacttttaatgggaacatcaaaatatatctttagatagtattgggcttgagccagacaaaagttcatgttgcyatgagggagaagagagagagcagtcaattttgagttcctttgttgttttacacaatcttagtcctaggtacagattttagaatagtatttcatgttctaagagtagtttttatacaatgattagacctttaaatttttcaacactctccccytaaagtttttaaggtcaaaaatcatgaataaatccatgcttgatagactaaaaggttttggcttcagagaattgtcagtagacttcaaattggagcagcctttcacttctgttacttgagagttattgataaatttgcacactgctggctgcagtcctaatgaatatattcatggaccatggagcatggcatggtatttagagaaatccaaaatatgatttttwaaaaaaaatagagttggaaatgttattggtgatttaatattttaaaaaataacaagaatatatgctattttgcttgtaattccagattaaatgttaaaaatgtaaataatagatgataaaccacaaatgatgttcttaggccattcagtttaagccacttttactaatgctattcacaacacagatgaagtatttataaaaattaagaggtttagcgtggtaactcttattaagttgtaacctttatattgacagaaaagctaggataattataagccatgaatatctcaagaattaatgaactgcaagtctgataataactcatagggtggggataggaagctttcacatttaatgaccatttctgtagtctagagttcagtttgaacttttatttttattttcagtaaatggattataattgtaaaatgtccaattakactctcccattcaaaaggagagaacagcgcacttctgatcctgaaatttgaatttaactgggcatcgtgtatatttatttattaaatctcrcaacccacatttatttatcctaaagagagataagatgatgagctcagtgtaggactgaattttataatgcctagaattgagacaagccccagtgggtcctccaraattgtttctgggaataatgatatttatttgctaataatgaatataatatccatgagaggagggctcttctttttggagggtgctttaactagaggatcttagccagaggagtctatgtcatgcattcacagagggctagtgttctcctagaccaaaaagggaggaatgggcacactgtgaacctcaaatgaggtggcatcttgtgcttagtttatttttaatttaaagggatttagtgtgtaaacactaaatcaccaggttcctatgagccactcccctatcattatattagtgagaaatagtttgccaggagccatgacaaatggtcattaggagtgccatgttaactcagtgaaggtcatttaagtcatccactggtcatttatgtttccctctttggtaaacaccacattttaaagaagtggattaattatcatcaaaatctagagctatatgctaatagatatcaaggtagttttagaatttcacttttttttcagaagcaagatgatggctaagtgtttgatatgatatgatatgttgatgtgatactgggaatataccttttaaggaaatttcaggaaatctgaaatcatggacaacagagataaattatataaaaaaggcttaaatgggcgtgtacttttctcatattaattaatttgtgttctttcttcatttacaaaggtacgttatgaagatatattcttgttaaaatttatttagtaactcctgaaatcagttatctgattagaattcagctttgtttaaatttcatctttaaaatcttaactcatgtatattaaggaaaattagaagctgaaattcttcttgagaaaatgttattttaaggttcatatattgatgttttattttattgtaaattatttttatgtgtagactatgttgatgttttaaatgtggggtgaccataatggggaaactctgcctttccaaaaattttgggctttttttttttccagtcttattttattctaacttcactggctgcagcaacatacatccagtaaacttaatcttctcccttactgtgtaaaactgtggatgattttgtgcctgcgtttatccacatggatccccattcattggacaattggataatgtctaaaggctcctaactttttcgcaaggaggaaatgctgttaattttctgctgccaggtgaacgcttcaaggcagactgaatggcattgagagaggtggttgttactcatgactcctctcctaatgggaattctggtgatccaaaaagagggatttgtgactgtagaagccaattttccaattataaaagaatttagctgatcatggacaccaactttttggaaactctcattttatttagtattttctaagtatttcctaaaaatgatgttttattttaaaaagatgagtcttatgttgatacttttcatttattataaacttacctaaaaatcagtcaacacctgtaaaattttggggaaaacaaatgagtatatgagatagtggagctgtgatgggtacttcactttgcttctgagctagattgtttcaactctgcgcctaatgcctgagagtttgtgtatagtcatatctttcgatatctttagagcctaggtttagtatcagttgttttcaatctcaactgtccagttgactcaaaaaggaaagctttttaaaaatcttgctgtgcctgagctttataacttgggytgccaaatgtaataaataagaacatgggatgtttagttagatttaaatttcagataaacaagaattattttgttactataagcatgttaaagaaataccttctgtattttatttggcaacactgcccatggccgatagattctggcttaattgctctgggctgaggtctgaccattggtgtttttataaattttccaggtgagtataatgtacagccgacttgggaaccactggctagcttggcagtgtttcacaaactgtagtgtgcgcaggaatcaccagaaatctttgtgaaaatgcaatttccaaattcccctccagttaattcactaagatggagttacagaacgttaacaagcatcctggttaattctagttacaggtgtgtgaaccaccacactttgacaaacaccgttttagggcatattaacaagcactgctatttcttttatttttaaattagtgttgtggtcttgttattttttaaaactcagaataataaaataccagggtacagcataatgcactggttaagtatgaacactatttttatatattagaataaatgatattgattaggaagatgtttttcggaagaaaaatcaatatgaattgtgtcctgttgtttgctatcatttcttaggtagcaaataaaatacatttatcttctgaattggaaaatgggtctgtgatgacagtatgttaactttaaggaccccatttttctgaggactctaatctttggtaactggagaaaattacctttggagacactaaacctgggaattgccactaacaatttaggactggttgtaagctcctgctgagcaaaatggctgtgagaatgcattccacaaggttaataggcagatttttttcaagattgtatatcaggataaataatgtggataattgacactgctagtgctaagggcttttttttttattttattttttatgtggtttcagtaatagagcaaagacattctgtctgattttagcctctttgtttttgtgatttctgagtttcaaatcgatatttttcttaaagaaaacccaggcaagtaaatattatgtgttattttcaagggccatttaaattgatggaaatctctactgctattaatgatccagagtaattccttactggtgtgattatttcccataatctattaaggcattattgattaaccacaaagcccattttatattagtagacatttccatatgccatcattgacctcacatggttcttttagttagtgtagtctttggtgtatttactccttttgttccaatttccttcaaatatggaaataacttaggatatattttctaagtttctctgctttagcaaaactgaacaattactatttgcttgttattacaaayatttactagctactcaattgratcaacctgtctaaattctttgtggcattgtgactctataggttaaaaggctactattattctaaggagacttgtgattgctttcaagtcctagttctgtttgttttgttaactttgagtctagtaaatcctcgcagagaaactaggaaatcasgtttatataactctttacagttttcacaatgacttcacatgcatttttaaaatttggtcctctcargagttgtgtggggtctgcagggcaggagtaatcatgaatcccacttttcaaatcaggggactccagctttgaattttaagtggcctgtgctgataagtctggaagtgctggaatttttccttaaatgtggaccttctgaccgcagtgccctttccactctatcataaccttctcttattacagcaaaccgaactaagcaaaacaataaartgcaattggtagatattggttcacacggcaatgattacttaatttttttaaagtattgatcagaaaggaggtagaaaaagaggagactttatcacaagtagaaaaagaagacacataatgaagtaaagatttgtaaacaagctgataggaaaactcatgaaaaatcttcaagcagcatgatcatgttcaacacattcttccaactcttttctgtttctggcagggaaaagaaggtacaggggcttagcacaaacataaaagagtgttctgcagtttaagttgtattgcagggaagaatctgatgtacaatctttacagtggacttcagtagagaaggagaaaawgaaagaatgttgaaggaacatgtatcttttgtagccgaggggcagtgcagaaggagccaaagaagaaatgggatcctgctgtggccagtcaccatactgatggtttgcaagtgttcaaaactgttagaaagtgcagctacttctgtttcccatagtcacagaaacagcttcgacaaagtgaatacactattcatgcctgggatggaaaaaaagcaccccgtaacctacacagaggcctttttctctttcattggaaaaacaatggctttattttctggaactgtagatgtgttgcagattgaaactgcttgaattgcagggctgtggtagtgaagtcaggggagacaaccaagttcagattaattcatgattaaagctgagagtaatttagagtaacagtacctaattgcttacagtttaagccagtgggccctcaaactttaggagaaatcagaatcactttgttaagagtatagactgttgggccctagccaagaggttctacttaagcagggctggggagagactggagaatttacttttctaataagtttcctgacaaggtgatgctgctgttgctagtacagagaccacacattgctaacttttggtttaaatactgctttgattactttaggtttccaggagcaatagctattggttaaaagagagcacaagcattcaccgtgatgttcttttaaatatccatcaagaatacaaagagtgaccagatatggagaggccacccaggactggagcaagctcagatcctcttgctgacctcttctagcattttttgctgaggggcatcctgggaccatgggccttgctctccaggtactgggataacagcagcattttgcatgtaccacaascatttaaaatcaccactctgaaaccatatcacttataatctgtgaccttccattgaaaggatgtttccaaataccaggcactsctgatttcagaagcaaactcagcatcagtaagcccacgttctcactgaggaacacagagtgctcaggtgtgcctgtttggtgtatctgtctccatttctccatctttccgagaaacctgtttcactgcaagtacatgtccagtttcagtatagagattaatagcctgattaaaattgatgtttatctgttttagggttgcatttttaaaaaatggaatccagttaaccacctctatggttcttttacccacaagctgtgaccaagagctatttcttcacctgatggcaacaaaataatgactatgagcaaattactttgaaagatcatttaaggcctatgcttttgaacacagtcctgttgcacttgcaatagacattacaagtcagtttccccttcagmtttcctaagcaagggaaagagagaatgcctccttctctactctgtggttgaatgtgtgcagaacccagagtgtgagtcactacctcaagttggcagcctacctggttacagcaggactttacagaaaatccagtctgggaaagctgcctcatataagacaatgtagacaatgctttgcatttaaaatatgaaaatagtgcagaaggtagaaagattatagtaactctgaaagaaggtctgtgttgtgaaagcaagtcacaaaataaaggcaaagaatrctagtagcaagagaagatatatcaattatctaagcatgacatctcaaattaagtgttttttaaaaaaatgtagtaatgtaatattcttaagaactgtgtgctatgcctgaataggtccctgtctctctccctggtgtaataactgcatgtatgagatgtacaagtcattattgcacattgtctgggtrggagtgacactctattcataagctaggcactttaggatgtacatttattccaacagatgcttagactccatttagaacactggcactgtcatttatcaaatggccccctggtggtatcaaagagttaatgaggatctgaaatttcctaccaactgcccckcaggaaagacatctgactcccattcttcagtctagtagagcagttggcaccttctgacattcatgccaagtcatcctacccagagccctggattctcaccgacccagtcaccaggcattactgtctgcatycacactttacggagcatcgctgctgcccttcctcattcaccttcacttgtttggactctggattgattttatcatatgttcctgctatcataagtgcagccctggctccagggctggtctctgacttggcaaaaacttcttcaccctctgactgccttggcacgaccgtaagaaaacaaagcggattcacctctaggacttacaatcataatccttaatgaaaaaaagtaaacttttaaataaaatgctaatacaatggctaatgcagtgacatgaataattacaaatacaaaacaaaattcctgacatttaatttaaaatgttggtgtggatgggtgtattatctattgcatctttatgaagctacatgaaggtaaacttcttgggcagtagagttatctctatatttatcaaatgacagaaaattgcaatacaaacttatgctagtattatgcattttttaaaaagcagaatatctttaacaatgtcattaagaatgtgttcttggccacttgtggtggctcatgcctgtaattccagcacttcgggaggctgaggcgggtggaccacttgagcccagaactttgagaccagcctgggcaacatggtgaaaccctgtttctactaaaaatacaaaaattagctgagcattrtggtgcacgcctgtaatcccagctcctcaggaggctgaggcaggagaatcatttgaacctgtggggcagaggttgcagtgagccgagattgtgccattgcactccagcctgggcgacaagagcgaaactctgtccaaaaaaaaaaaagagagagagaatgtgttctcacatagagaccagttctggaattaagcaaataaaatagttggatttcatagtacaacatgccagttggaaaacagtttagrgattcaactctgaaaaaattaagagagtctttgttgttctccttttccagatatatctatacctgagaatatacgacataacttatatagcaaaccttctatagaaaggaacttaatggaaaacataaatggatggagtagcaaaaagcaacttgcactttctattttactagaatgaaataatttttaccaagtcaccattatcagataatatccatatattttttggagagcatttttcgtatttctgcaggcttgttatttgtcactggcaaataagaagctactttctcctgttgctgagttttagatgtttatattttaaacctgtgttatttgtcatgctctatggggttttaacatttaaaaaaataaattagcggctgtggaacattaacctgtacctatggatgctggtactgatgaaggcaacagtcacctaagaattgyggagtccctgtcgtctgtcrgggcagcaaagataaaaagctttaagataccataaatttataacatggaagctgaggaggagtttcttactgtttctttatgtgttgccttgtttgctgggccataattataaactgattacagctacaggaaaaaaaaatgcctttgttgttctttccacagaatagtaattactctgtattgtgcttcattgtgtgtttttttttggttagtcttttgaacattattagtgtatcttggatttcagtatggcttctggcaagcaggaaatgcaaaataagtgtaatatacataagatgtttatagtgattatcttattgcatgttatgtatcatactgtagacaaattaagtctatgctaagaaaaaccatcttgctttcctgtctatagtcatttgtgatatgtttgatatggtctttgctatttgctctatttctcctttctcttccttgataatatagaggtagctcagaaaaagtcatatcaaagttagaatgccatatgttataagatttcaaatacactctgagcaatatgaaaaatctattctctgtgaaaatagcttatctttcattaaggctgaatttacatcagctgaagacaaaacaatggacctttttttttttctgtctctgaggtttttttttttttaactgaccagatctacctctaattgctttctcataggcacaatctgtgaactcaactcctagagtctaggtctaattaaacgctctcgtggtttgctgctaattgtatgttcaactataaagttatgatagagtccatttgtagaggaaacagaattcattcttcatgtcatttaacacaattgtattttattttaccatttcaaaagatgggggaagaatcacattctagggcataggagatatttgagtgactctgaaaaaaagaaaatataaagaagatgtagtataagtaggatgggaggtgttaaaaagcacatacaattttgagtgaacaaggcataaatgttaaagatatctgaaagggtttkttttttttttgagatggagtcttgctctgatacccaggctaaagtgcagtggtatactctcggctcactgcaaccttcacttgctgggttcaagcaattctcctgtctcagcctctcgagtagctgggtttacaggtgcccaccaccaggcccagctaatttttgtatttttattagagatggggttttgacatgttggctagactggtctcaaaatcctgacctcaggtaatcctccctccttggcctcccaaagtgctgggattacaagcatgagccatcgcaccggccagattgttttaatgatagaaatctacatttttcaggtaactcatcatttttgttggatttcatcaaagattcactgaggaaaataaaggagttgcattttttaatgtggtactttcaaatagaaataattagatggagattttcccctttagccatttgtgatatatttaatttttaggtgatattttttgtctaagagaatgaaacggatcacaaacggaaagttttaggaatttctctgaatattagtgaaattaactaaaaattacatttcagtagaatttaccctagttaatgaattttcatattgaggcatgatgatctacaaatatgtaagatgatattgaatatccagaaatagaaataaaaaaaagatatcgaccacagcaagtcagggcaagagaaggttatgaagaagtaagaaagaacagaaacataacagcaaataaataaataaaatgggatgctatttggaaaagtgatcaaggagaatagaaaatactttgtaaatataataggaaaagaggaagtttgagaatgttttctcataggttgagaaagaattgatttaataatatttttcacatgtattttataatagaagatttgtacttttgaagaaagacttttcattaatagagtaatacatagcaagttgttttaagggtaaatgagttttcatatttaatttcaaatgactagtatcaaaaggaaagtaggcctttgctactttgataacaaaagtaacactataggatttagttggaattattattackccctcccctctttttgttgactcccagaaatctgagaaaggggactttgggatagttgaaataaatggccatctaaatttgttgattgtcacacacatgaaacttgttggtgacataaattccagaagtgataacatgttgacaaaatgcactcagagtggtcacacccgggcattatcagtcattaatatttctgtgtgaagcagtttcttttgatggtattgggcacttgttgggcagagatgtggagaaagaaggatggctatttagaggagataatgatctagaactgcaaaagcaagaagcactggagactaatttagcctccctcattactaggttagatgtgtactacacatgggtgcagaaaagagccagcattgtgacccagaaaaacatttgcaaaatgaaaacaatatgatgctgaaaataactctgtgaacttaactaagagtaaaacagtcatacagttcagaaacgctttgtcagattaatcagatcttctaaattagattggcacatccagctgatggacaaaaagttcatacatggtaactataataacttttgagaacttttgaatttgtcttattaatttataatattattggagtataagaatatagagtagaacaactagttcttattaaggaacatgataggttatagaattgtactaaaaataaaggacaaggggatgccatgaggtggcctgtacaggtaggacataaatctacttataactttttgtaacatggcagtggaaatgacccctcactgcaggaatggcwgacatagaaggttgggatagaggacactcacattttttgagatgttaccatgtgcactggaaataaaatgatgaatgaaaataaacatgatccctgcccttgtgaaccattaacaaaattgtcttaaaattagataggaaagcaagatgaatttagaaacaacaaataacagaatacctttaarggcttttattttttccttgtttattttgtaaacagtaattggttcattaaaaagttcrttaatttggtgagtaggtgaaactagaaaagaggtactcaggtaaataggtattttaaagtcaaatgtaaaaattttgaatcttaagtgacttgtgtcctgtgaaaaggggcacaagaaaactagaaattgtagtttttatttgattgattccttacaacactttgaagtaggaggtcattattctctctttcacaacagatggagacagtgaaagcaaaagaggttgttatttgccatagataacagagttataagaggagagatttctcttataaattttatggttttcctagtgctccagaaaacctcaaaagactggtaaaattaaaagtcaaaatgtggtggagtatgtttagtgtccttgggtttagacacaaggagatcatagttatatatcatataagattgtgtccagctaaaagtaacagagagtggaaataacatttgtttaaatgagataaaacctcatttttgtgtctggtaaaatctagaggaggtggtgcaggaagggtgcagcggcactgctttacccaggctgtagtgacctaggctccttctagtttattactctgctatctccacgttgtggctctaattcctcctggttccaggtgacaggtagarctccagtgatttcatctgccatttaggtggcaggatggagaacaggatgaaaaaggataaagaagcgaaagacctgggtcttaaaagacccgggtcttttaagaaaggttcctaaaaattaccatactgtacatttgcctacatcctattggcagcagctaaatttggctgcaaaggaggctggaaaaataaagtctttattctgaccaagtcatgccttcctaaaaatcgtgggttctaataccatgtaagaagtggtgaattggtatgargtacaactaatggtgtctgcctaggtagcattggtgtgtggttgggatagaagtcaaattgcagcagccaagatgtgcattgcaataaggaagtagaagcataaaggctcttctaaagagcttgaccgaaagagggtgttttaccagattactccaatacccgagtctgtcttgttcctaaaagtattggaagactattagaaaactcacatattagaaaatgacacattaagccaggcacagtggcattcacctatagtcttagttacttgagaggctgaggcaagaggattgcttgagcccaggagtccacggctgtggtgtgctatgatcatgcctgtgagtagctaytacactccagcctggaaaagtcacctcatatagaagctgaacgcaagcttgtgataaaaagtcaaaggccaaatggttactatgtgcttacagtactagtgttagttgaaactggtctttcctaggatctggtaacacgtttatatcttcatctaaattcattacactgtacktgggcatgttctttattgtttagacctgagctgtaataaaaagagttagatcactttgaatagacaggcagagttgggattcttggcttatcacttactaaatctataataatgggcaggttatttaacctgagcttcagttttcctaaaaaacggtaataataatacttgcctcatagagtgattacaagcattatgtaacaatctgtccaacttgtctagcatggtggtaggctcataatagatcccaataaatggttaggtcttcccctttcagcttctgtgaagaaggctatttaggaacgtgtgtacatttgtgccattatgtttaaatgttctctttatcatacctgttttctctccaagtccttggtgccagtaccataatttggggagcaaaaataaatcactgagaaaagcagatttgttagaaataagtttaaagtgcatctcaggctatgattttcacattggttctaaatttatcaaatttctatttataatttttctcacaaaatatgttttgatattcaaagcatgcaaygaaagtttaaagatgaaaatatttttaattctttttttgcatgtgcatgcattgaaagtttaaagatgaaactgttttcaatttttttttgtttttgtacacaagggtaataatgagagatttaataggtcatgcattatctctcaaggtgaaaccagggtttgttccttagtgattcagttcttactgggccaaaattccacttcagttytggaatgttttccaggtcctgatgcagcccactaaagctcacacaaaccatgtgctataattagcttatatgtaatgttgaaggacatcacattttatattagattattttcttttaaaggaaagatgtgttaaattcactcccttcttattgtaaggtaggtttgtagtcaaaagccacagtttttgatctgaggctatagatgaggtctgcctaatgaacactgatgttttattgattgtataggaagtgttgaaatatagccacaggttcctgatttatgaggggtttgaaatgagctgtcatgtgagcacttacctcatcttggatctgttgtaccaacattgtctaatatagttagtctcagatgatctatttcctctattatggaaattatcctgccagtccatgtgaagagaaacaaaaagcagacaccccataccaactctaccttttatgtatatttatttgaacatttgcagtgttcaatttgttactatttgcaatgaacttgatttctacatgttttctttattttggaaatacactgtttgtgaccaaccacattgattttattatcactaataggccatggcctatatgaagcttagaaaaaagcaggtagggctaggtgcagtggctcactaaatatatgccttcagaaatagaaggtatagatttagtttgtttgacaatgttttccttactgtactttactgtatctcataatagtttcctagagtggctcttcacagaatattaaagcaaaaagatttatggagagctaattgggattatcttacttatacatccttcttgagaaagaaattcaggttaggttggtttaacaacattgatattaacctaagatgtatttgggtaccagattagccccagcaggagctcagagaagttagatccggccccagtcttccatagggattttagatcattgggggagaaaataatacctggaaacaagctgtaaataaaaatgatgactggaagatgaatcctgcttattcattaaacacagtctgcagcctctgtgtttactgattcctggtgaggacttggagcgagtatacagtttgcatccctgaagatgtctgatagaagcagaggctgattgaattaattggaaggcagcaagggaggtcatcttgtctggtccctgtccctatgaagaatggcacagaaactctcccagacagattgcgacctgctttaatcagccactggcactatacctatgcctgtgctgtgacccctaaaattgggaagaaaagtgaaagacctagtcagtcatccagaggattgactgcattgtacagaggcaagaattgttttcatttttcatttgggtggtccaatamtacacacagacaccctaaaattttcacttaaaggatatgcatcataaacttcaggcacttawgggcctttatttacaaatttaagtttctgttataaaatcgtttgtgtttagattttttkggttttcaaaaccaaaagctgtggttctttgttgttggttttcactgatagtttccctttggagtaagagagaacctgcccattactcatactttcttgttattcatttattttcatacttcattattccttcaatgcttttaattcctcatgggcaaactcattcagtgatttccttaagttttagttatcctcaatagaacttaattacaatgggagagaaaatgaagctgaaaagagacatgatataaaacaagagtcatggaattaagtgattagggttctattcctggctgtgcctcttcacaggttatcagacctggaaaaaaatcactcagttcctctgtctcagtttcacctttgtggaatactagaattggactaggttaatgagtttcaaatttttttttacttcactccagattaataatatattgtttatggcaatacagtatacaaacccacctctcaactgaaataaagactcaagaaacaatacttcctgttactatttgcaatgaacttgatttctacatgttttctttattttggaaatacgctgtgtgtgaccaactacattgattttattatcactaataggtcatgatagcttagaaaaaagcagatatggctgggtgcagtggctcatgcctataattccaacactgagaggccaagatgggaagattgcttgaggccaggagtttaaaaccagcctgggaaatatgaggagaccccatctctacaaaaaatttaaaaattagctggtcgtggtggctcatgcccatggtccattctacttgggaggctgaaataggatgatgtcctgagcccaggaggtcaaggctacagtgagccttgatcacaccactgcactccagtctgggtgacagagtgagaccctgtctcaaaataaacaaataaataaataaaattttttagaaaargcagataggatgagattattttaacataagcatttctattaattacargtttaaggtgttataacatgtgttcccgtgataatacttcattgttgacaaaatcttaaaaagataatggaaaggggaaatgttttacttttctatgtttatatttaaagcaggtcatcacattgactattcagctttttgtttaaaagggaatacctgagagagtactattagtaacttgcaaatagaatgattgaagtcagtgttgaatgatgacacattcttgaaaacaattctgatgccatctctttctctgttcctgggttggaatttataacctagggagattgtaagtaataaaaataatgataacgcagtgttggaaccttgaacttggacatatcctacaaataaggcaggttacattctcagagtggcaagtgagtatacaatttttaggaggtgcaggctagtgggattcccctgacctgtcataacaggaacaaactcactatgttgaccatgcattaggtaaatgtgcagttatctggctggcaggacatgctatttctgtcctagacactgttgcccatctaattgagcagcactggcatctgtccagatacttaagccgagaacctagaagtcacccttgggtaccactctttgctatggtgcccatatccaaatcctgttgtttttaatcctgttttgtctctagtgcaatcacatttcttcactttcatcaccaccttagcccatgacaccgtatgctcctttctgaactataaaatcacctcccaatctgcctactccatttactctttcctccttcctatctgttctcttgactcagtgctcttttagaactggaaatctggttatgttaccttttgatggcttccctctgcttttacagaaagaagacagatagactcccggtcatttgcattgttccataatctggccctgcccccgtcaggcctcacctgtgcctccctccttcttcccctgctgcagcctcactggctgagcctcactccttgtactcttctgctgcccccatcaatgggcttttgccactgctgtcatcctgtgctcccctctacttcccttgcccacctaattcactcccatttatctttcagatcgtagtcccagtgtcactctgtgacagcaaggagtaggtcagtttttgtttaccattgtatcctcctcactgcttagtatatcacacaagctcagtgaatgataataataaagataataataatatcatcttatgtagtgcctattcttttcaacactcttctgactgcctaatgtatatactaactcatttaattgtctaatrtatatactaactcatttaattatgacaacaaccctatgggggagatattattgttatccccattttacagataaggtgcataggaggttaaagggcttactcaaagctcataactagtaaatggtggtattgagatttgaacctaggcagatyggaagcagggtggttggtctcaatcacagaactaaattacctttctcatgcttagtaattgaatatatgaatatayactgagtttaactttctgttgtaatctctttcatttgtataattgaaaaagtgttgtatgttatagaaggttaagtattttatagcctcacatatcaaatagtgatgttcatttatttactacataaggtgccagatgccttacattgtctcatttaatcctcacagcagccatgcaacataggtcataaattcctattttatgagtgaagaattcagagacttggaggcagagcctaaaatcttaatctggtctcaaaacccatgctattttatatttttccgtgttgtgtagaagaggtaggacttaatctgggcttgctaggatgtgtagaatttaaatgagagaaaaacgttgagtattaaaaataaatagaaatttataaattataccagttaatgaaaataaatcattttataaagctacaaaacataaaatattgaagaattaacttaaaaataaatgtgmaagtgacatatctttattaaggattcctaaagaagatttgaataaacagactctatgttagcaaatggaggcttagtattgtagctatgttatgtctttcataattaattttaaaaattgatatgactaataaaagttctaactttttgaactggtttaattagttataaagactattagactaatcagaaatttttcaaaagagtatgatagagtacagaatgaaccaatggtataacataaacacataataatcataaaaatgtagcattggcatattaagagaaaaatggcctaggkcagaaaatccagagaggtgttcaagaatatataaaaatctgatatgttaaaaataatgttatataaattatttgggaaatgaatatacatgtaataaataacactgggagaattggttcacaatttggaaaatgaaaaacttatgatccttatctcaacccaaatatcacattgaatataacaaaagaattaattgcaaaaatattaatctgttgaatgattaaatattagataagaatcttaatgaaagattaaggacaagataaaaaaccatgcttttctataatataggggaattctcattatagatgaagtgaatagagcatattaaaaagagtatatcactttaatgtttaaaaataaagagkcaaagaaagaaatgtaagacgccacaccaatatacaaatggtcattaagctgggaggctaatagatttttttttattttcttctttctacacttttattttccatatttctagtattaatatgtattacttttgtaatttaaaaaatagactgtatttttaaaaggtaaatcctgagccaagtcatagggtctgaaatgactgtaacatattgggggtgggggtagcattagaagtcctttctgctgaagtgggaatttccaggcccaaatttgaattgtatgaggaggagtgtctttaatatgccttaaaaaagagaaacattaactatgatatatcaagttttataaattattttaaatcaaaatttgtctctcatgtgtatgatctaagataattatgtagaaaaatgcaaataattgaatttaatcaaacaggcttttctttgttcagggacttagggatatatctatgaaataatttgcttttctgaaagtctttcttttaaactggttgttttgcctgaagatacactcttaatcttatttgccacttaccttaggtttttcagtgttttcraaactctagggcattgcatggaaatttttaatacctgaaggggacacctggcacctgcctgaagcactttctatttcctgccaggcacaaaggagagatgttattgtgaactgatctagagctcttcagtggttgatttacaagtgtctcctcatgtgtcctcaggcagctaagagccttcagttcttgctgctacatttaaattacagaagaagatagcaggtgattttcagcaaaggacccttgtcttctaattttctctgccctttgtaaatagataaggtagtggctcaaattacttcattagtccaatacatctgtctctacaggtccttgacagagccagctgaagaatccacaaagcagaaccttgggtgtgaaattctcttttgagtttgatgttatattttaagaaaaatcatataaaggcatagactcagacacaccaccttccaagactaaaatactttagtcatttttataaagataaatgtataagctttattagcgttggtctttatcacaaatgtccagtccttttgcttgggaatttcagccattttatgacaacttttccataagtggatggctgaaattcataagaagttttttttgtttgtttaacagttcagaaaaatgcttaaaatgttatagaaacttttttcctttttaagtgtagttcaatataagtattggcatttctgttagtatttgttaatacttattgtcagtatttctgtaaaagtttatattttataatattttttgactcctactacactattgtctttaaagattaacacaagtgcatgaacacattacatgtagagaacctgcatttacagttaatttaagagacaagctaatcattggtctggtgggtgtaagtaaaaggggaatttggagaagcaaaagataaacctgaactggaagaatcaaaggaaatttcacagaggagaaggaatagcggtaatggcagaggttttgagtcacgtagacctgattttaaattgccgtttactgccattactttgcaatgttgggtaagttatttgactttttgaatctcagttcttctatttgtacaagaggagtagtaataatttagaattaaagggatactatttgtgaagtactcttaccattttaattatttgtatcctccctcttccctttcacttctctgaccttattttccataattgattcatttagccagcatatcagaaaaagaagagacctaaaatcttctcttttttgaggaaccagatttgttcaatggctctaagtctaagaataatggaaatatggtgacacagtgaaccaaaactctgaatgcgggaaaaaattaatccaggttgacatttggtatttttgttagtgcagaatttccaggtctcagcagtagcccagttacaggatacttcatactgttgtggagaattgggtttagtggtatttgttctgtcacacttacttgaagattacttaaataatcttcaagggatcttagaaagtataaggaggaagcagttagaaataagagaacatgccttagaatccagaatttcagagctggaggggccctgacagagcatcttgttcagttctctaatttttactgagaagtaaccaaaagccagagagatcatgttttgcccaaggccacaaagttaattggttgtggtgttagaaccagaatgcaagtctggcttctcaggccgttggttttactgcaacattgcataaggtgctctactccaacgtagcttctttgattatgccagtgttgcaaataaatgatcaaccacgttattggtatgtgattactctaaacatttgggccttttattcttttaataattaaacatctatataaagtctatactctgttagaggatataataaatagcacagaacattaaaaatcagtccttttaattgaggtcttgatgcccttggggagatatcattaaccaaatcttcacctgatttttcaaactgttcatggtgccaattttctactacctagcatcagaaccctgagttgttcattgcctcctgacatttactgccatatttaatcagatagttagattctgtcaatttggcmtctaaaacatattttctctcattcctttgttttcacttccctgggttatcctgtttccactttctgcataacctgcctcccaacttatctctaccttcaacctatgcttgcttcaattgattttacacattattctcagcaataattttaaatattgatcatagttctccatttcaagtgaacaatattcagtatttaagcctagtatttaagatgctcgatgatctaatctaggcgaagtttgggaagaaaatcattaaatattaacaaatttgaggtgacatctcccctgaggcttggaaacatctaggcaaggaatgaagagagtgaacagctgaataaaggcctgcatttggagatcttatgtaatattcaaggacctaagagtggagcagagaggtgtgtggtgcagcagatgaagctggagggatgaggaaccccattacagaggtccctaagagtggcaatgccagctgaaggcccaggattagtgacatggttcaggaaggtgtccaaggccactcgccttytaagctgtccagctgggacctggatccagatctacctgactgatcctctctctcccctagccagctgcttctatcagtcagtttgcctttctgtctcatctcagggttcatattttcatctgtcttcagtatgggaggtgcacactttcatgtgtggatcctagtgctctggagatattcctgtataattgaacatgcttgtatttctaccttatgttccccctattgtatcctggaacccaaatcagtttaaatttagtaaaaaaaaaaaaaaaaaamaaaaaaaaaacctatttgtcagcttgatagcgctcactctttagtgtgygatgtggttcttggcatggttctcayggatttaaaagtcactgcactatgcagtaacaatatatctgtgtcacattgggaaaagcamaatgtaaagcatgacagtcttattcctggttatcaataggcagagaagctcctgtgaaattcagaatgacttytaaatctgggcctagatgcataaatgtatttattcatagcaggttcacaaattcccttcttcctctaccattctctccagagcaactccaagaaactgacttaattatttaaaatagttgcttcataattcagaaaaattcagggagaaactttaaaaaatacttcttaatctacaaatttagattgtgggattatttatactccaarctgagatggttgtaagaaaaaggcaaccaattggatgtttgatttccscagaattaagcaactggtatgacttccatttgttttttacttgaattgaccaactgcttattggaccatcattgcattgatattagaagttttatatgcctaatttcaggacaattaaattagtcctctgacattttaacttaaaaaactgaactttatcctgagaaatgggaaattcttagaaagcaatgctttgcaaccacaatgcatcaaagtctgaaatttctcttaggctcaccttaggaacttacattgtaacatatacaatgttttgccaacttaagtcaatttgccttttttactgaaaaggaacaaaacccaagaatatataccacaaagtgtgaaagaccttaactaaagtatgtgtgatatttcttagaccagtaagaatttattattttccaggaacttgagatccagtcacaagatttagatttcattaatgaagatgtaaaacaatcttcccataaaatttaggaggctgacttcctctctcaccatgaaaacactttgctatatgttgttaattttaagctatacactaaaacacatcacaactttacaatcggtgatatttaaaatggttagctgacataaagcctttgacgatatttagcactttatagcaatacgttaacactaactttagaaactatagcataatgaaattttacagccaattaggttgatgagtcactgtcagcttcctaaactcctcttttagatgaatragagaatcaaatataggaagtgaggagcaaattctagctgctgtaaaatcttaagtgtcatcatgaggttgaagtgttaaggaacagaaaaatacattgtctaaacagcctgaaaagaaatcaaatgatccacttttaagtttagaaatggtaatagtattcagtctttcagtttgtcaccmtatgyttatgttgatttatggggagattcttacagtgttcattgattcacatgtggcaccagttactaggcagacttctgaactcttwaaaagaacaaaaatgtacaaagttgaatatgtttaatcaacagtcaaaataattggagtttataactagaaaagaaaatgaataatttgaatagtamaattttaaatatgtttctttaataagattatgtgtatttgattgttcatttagacctattggatataaagttgaatttttagttttattttttggtagggacagggtctcactctgctgcccaggctggtcttgaactcctgacatcaagcaatcctcccacctcagcctttcgaaatgttgggattacagctgtgagccaccacaccaggctgtttattttttaagaaatgctgaggaagagtatatgtattaaattggagcatgtcgattataatttatcaggaaattattgaatgctgaggagtatctttataaattgacagggagtttgcactggcattaaaatacaatgataatatataaaataaaatgataatatattaaattgaggttgcactggcactaaaatgataatatattaaatcaagaacattttaggatagagtaagtttgaaactataaaacattcacacatgtctagctgttacatgaattccatgggttgtaaaaaatttccaaattccttaatgctcttgtggtcattgcttcatttgaagccatttggcttaggcattttctgccagttctgtgtccactctccacccttcaccaccctgcagtaatggaaacatggaagtcctcccttttctttaaagcccacaaaataaaaaataattagattaaaaacaaataatatttacagaagaggtatgtgaggggtgtgtgtgtgtgtttgtatgtgtctgcagcagagttgtttagagagcagcaatacaaacaacctggaacgttagatttccctctgccattattgtaccttgggctcaagcctttctctgtgttgctgcatcctcctttccctcctctctgtatctttttcttcctactgctttctattttctgtttccaccctctcaggaggaacacattcaattcctgcttattgggccatcattgcattgatgttagaagttttatatgcctaatttcaggacaattaaattagccctctgacattttaacttagaaaactgaactstatcctgagaaatgggaaattctttcttatttgcagatctttcgtgtctttctggcttctacccttgtcatcagctccaggcctccctgtgtgtctaaggacatggtggaagctttgaaatgcgtaaatattgggaattgtgttctttgactcttcatctagtgagaaaaggggaagaatttgattagattttcttcggggtgtgcatatcatgaaagaattatttttattttcatacttcaataccataaaattctctaaacaatagatctatagtggtatttttgaggattgctgtatggaagagcagaaatttcctaaagctggcccacagactcakctggttgcaccagaatctcttggcgagttgttgaaatgacagatccttcatgtcccaagtagggagattctgacccagcaagtctggggtggtgctgagaaatctgtacttaaggagagacccaagtgtggaaacaactgccctgaacctcactgtctttattttccgttatcaagttcagcgatgcaaaataaatgaaacacagggatatccatccagacctagggactgatcctcaaagttgttattcagtcttctctctgaaatttcctcgtcacttgcctctttgttcataagcaaccatcctggttttccgggggctcttcaggttttggtcctaggtcctgagaagcccttcagtcctggactaaacaagaggggatagttaccagactagaatctatacggaaataacagcgtctatttggttgctgtaaccatccttcagtatttacttatgaatgatctactttgtggttaaagccatgggagagaaattttaggcagaagtggaaagggttgttttcacaggaaacttgatgaatgattctgggaacaagcagtgttgttctaagactcaggagacaaaagtataacctagggatagggagagaacatagtccccatgtcttgtggatcttagcttagatcatgcagctaaggggtaggttgaaggagacaatataacttttgagaagtaatcttccctgtctctttgtgctcgcaaacttgcaaaactttcagtaggataytttagggaatcccctgcagagatagccttgttttacatatattgtttgatatggaagcagcagactacgtagagatatggtaggccattggaaatatgggacgatagcagttagatggcaagaaaggtttagaaaactaattttccaaaaagctaacttccaaaatgaagtaaactgattattataaattgatctartgttctggattctgtagtcaacattttatagtccgatttatatttctagactgtagaaattttagtagttgacaaaattgacaattagcagattctgaggttggggatgaagaaactcagccttggagaatgaaaagttgagacatgagaaaatcggaaaacctatgccaaacagggaggagcagaattcagcatcatgacagaccacagagaccagaataccaaccaagagcatctaaaagcacagagtgtcacaagtgattaagaccagaggaagaacaaaaacaataattcgatgaataaaaataaataaactgaccactatttttgtttagaaaaaaactagtttttcagagtgtaaatatacaaatataaaccacrttaattygactctctaaatatgtaggttatatgcattgatgttcagaaaacaaatatttgttgaatttaaatacaatttattcaaggttagtaacatccatggaaagtttaaaatacttgcttttgtctaagtgttaccagttgtgtaagggttggtgagggatgtagaagtgacaggagatcattttttgttcccttaataaactcttgatgtccctttcataattttttcttstatgcccaacattcttgccatctaccaaatttttctggggattgagagaatattgggcttgcagtctgagacctacgaatgcttcccacacctgccctatgtaccccawgtaccccatgtaattataatctccatgagtcttagtttcctcgctttcaaaatgataatgttggatcatagttgatctctcatttatatttcatttaaaatatatttcttttccatattaaattataaacaccaacctaaaagtaatctccagtgccaatgagcagccctaaatatgcccaamcacaggtacatttattctgaatgacattcattttgaggtatctacatctttttaacagaaattctaaatagaaaattgagttcaaaaagaaaacaaattgaatgattattataaagataaccagggtcacttaagggagtattgtcatataaaagttacaaaaaggctcccaaatggagcacattcaaaattagaactgatttggtaggtggtgaaagaccttactttgggccactaataaatgacactcctggagctgagacagatggcaagaatcacacactgcacattttacttaaaagatcaagccactaccaaaatgttatgtaattactagaatgcacaatataataggactcaataaggtggaaaaaagataatgaaactatacatcttttatttactttatatctttttgttgctaatgaaatagttttactctttccaaataaactyaatatccagtttaaaaacctgactcagtaagtatagaattaatcagaagtgaaatcaaatagtcgtgtctcattaagtgttcctcaaatgatggaaatcttagctctaatgctgtsttttattggaatctaacatcaactgatggtttttacttttttattttgmagggctggagcgaattgctcrggattcatcttatgaacaggaaggaaaggtccaatttgtaattgatgctgtatattccatggcttacgccctgcacaatatgcacaaagatctctgccctggatacattggcctttgtccacgaatgagtaccattgatgggaaagagctacttggttatattcgggctgtaaattttaatggtaagttacaacgtgtgtgtgtctaaatacattaaaagcgacagggtgtgtttttcctyctatatatagaagatacccaggcagagtggaaaacacaggattagaagcagttctcttctttgattagaagtgtgagtttttccacctgcttttgaatctcaaacatattttttatgctaccattaatctatgcgtgaaggaggcaaaagtttaaaataagcctctgtcaatcaaaatgttttacttaaatatcactattgaagagatcacttagaaggcttatttgaaaccattgacattagatttctttgaaaatgttttgttcatgtcattattagagaagagattgtagacattttgttttgaaactgattttaagcttttgaaacagtaggttgacttgaagaaaatggatgacttggagttgctgtatatttatactcaaygagtgttaagtttctgtgttttctgtttccttatatttttctcaatgactcagtccttcggaagcaaagggatgcacacaatgtaggcaggatttttatactgtaaaagcagaaatgttgtttctgtgactgccacgagaaactgatacagaatatactggattcacagtatttgattgaaaatagcccaactgcctgtctgaagtgatggaattattgaatgctgctgttctttcatgagagttgcaatggttgttgcccatgactttgatcattattttcaaatgaaatgatagaatgctctgagctgtctaatacttttggtttggctttaatccatacaatggacatgccttgagacacgcacagcactgcaccgtctatcataacacactccagtgacctcagytgccagcgtttctcagaaaagcacgaggtcatcttcaatttagaattcaagtggaaacttcttctttattttttttttttttgcatttttcctttaaaggcaacctaagacagaatttggtttaaattcaacacacatcgtctgtggcagaatatttgtgaaacattacataacattaatctttttgttgggaatatgaacactaacaggagtttgaaaataatttttatgcaattatgaaattgatcaaaagaggaatgttgcaatacaaggttgtttaccataacctgaggttggggaacacttcctttatctaatattgctagttaagaagtgggaagaataatgcagatgagtgaagtttccatagaactgaagctcacctccagaagacagggaagtcttttaaagaagcactaaagaaagcattttaaaggcaaattactaatttgtctttcatcttaaccatgatcaaaacctaacccttccttgatgacttcaattattataattattataccatcctgtaatataatgatactattaaagactgttaaagaatatcttaatgtaatggctattaaaaggatttgcctctagactccaataatctttgagttctgtccactttttttttttttttttttttttttttwacattatcaaagtgttgctgctgctgttgctgtgcttgtttttaggacaggtgctgacgatactttactggggaacatagacaaaacattcatggcacttcgagtttcctggagaacttaggtattaatcaaataagcacacaaaaatataattatgtaatctgcaatgagtgctgaaaagggagatattctggatttagagtttataatagtggacatttccctaatatagggatttaggaacagatgaaatctgaagggagtaggtgtctgagataagggtagggcaataggccaggccatgaataccatgtgaggtcttataggccattattaaggtttgttcttcatctcgaaagcaacaagaacctattggagcataatagaactgtgctgtgtctgatataaggcwacatatagctcagatgagggttatggaaaataaataaatcttagtatatgaacttaaaagacaatctctttgagctctttggagattgattttgctgggcttgagtcttggttgtgttccagtagctgataatacaggataagagacctgaagataagcaaatgatcatagaatacataattctgttgattttcagtgatttccaggatattcatcacattttaattttattattgacttatgtattcatgttcattctgtttatgataaaaatgacacacaaagctgttcaaataaaagtacaccatcaaaactactaaaggaggaagaaacaaatatggtaagcagaataaaggatgaaatcattaacttttgagcttcttaagcagtcaaagcataaagggaccgacaatgtgatttataattttcattatatgatagaagcaagcttacctatttttcaagagagaacacattttcttggaaattatttccaaaagaaaggtgtcatatgygactttgacagccaaatgagcaatgttattttacaaaattttacagcaaaagcagaagtcttctctggctgttttgcatttgtacccacaatcaaagttaagaaatgatgtaactcttataacactgaaagtatagtatatttcattaaagatgtttccaaggaggaggaagataatcatccttgatttagatgtataactctttwgagccctgatgatacggggatgtaccatactctgaagaataaatgaagaacatctcccttatactctagttttaagactctatcttcaaaaatatcctactcagaaatctaacatttcaatctgttaaaaaacaagaactgttaagggattggcatagccctggctggtccacttccttagtcctgcttactggtctcggaagtaccttgaagagtcccagtggctctatgaagcacacatacaatctgcagacttacacacatatcattgctcttcgcagggatttaatagcagctggaagtagacttttggagcttgtgttagctgttaggaacctagaaaacagctatgttatgttgttaattggaaaccagttgagttgattatgttggtgatagccagtgttctcacctggtgggacagctgacccacctccctaacaccaaaagtgcaaggaggccattggccaaaacaaggtttgctcaggaccaatttttaattttctgaagaacccagatgtgcttgactagaaccagagctgcttactatacacgacaacaaaaaacattatatattagaaggtttttagcctagctattgccagttgtcaaagaatgagctttataaggcaactgccaagtttgtacagtgtggccttctagattgtctgccaggatcagtgagctacaaaaggtactctcaaggaattaaaaaaattgacccattagatggaattacttagtaatgcccatttaaaattgaatagtggctatcccaatgtttaatttttgtatagataaaattgttgttaaattagttctttttgacataattagatatcaggatacatttctttgtatgctcctttttagtttgggatagtaaaaccacgttatcggtgtggaggaagattctgcttccagtttataggagcagaaggtgaagtagccagagcactggaagctcatcagacagttggtacaaaaataaagagaactgtttgtttcttaaaatttaatctttctcacattgtaaccaggtatgtggtatgcttacttaagcaatggtttaaagatatgtaaaagattgtgcttcttccagtgtatcatttaattgacaaagcaaagaatatgttagaatttagagtgataaatgactagtatttcaggccagaattatttcattaaaaaataactaactaaagctggaatattcagtcaaactgctgaactgtagagtactaattggcatcaaagacataagctacaatggtggtttaattgaatgtaatcactgaaactgattttttaaaatcactgaaaaaaaggtacctgaaccatcttctgcatctgtattttaagcacattctgaatcayagtgtatccagaattactcatgttttccttacaagttttcttaacatcttctrtctacttgggaagccagaaggaaacaaagactttccttttagggttacttttattgctgctatctgaacaaaatgttatttctataatttttaaaccctaagatttatcaacaaatatagagaaaaggaggttagatattttaggaacttgtcaattccttactccagactgatctataggcaataaaatattaattctgtacatcttgtatagaatcaaagatttttctgttgctatgagaaccttatttatcataaagaaagtgttggatagaatttcagagctacctccctactcccttgccctatagctgagctcatatcagggcaggtcaagcacagtggcatattaatctgaattgtttgattgtatgtaaccaaccaacttgagaaaccaactaaaacttgcttaattaagctgaaattaagaatttgtgaatgtgcatcaggaaaccgcatagcgggaatagaaacgagtctaaagaaagaactggtcctaagaaataaaaacctataagaaaaaaaaagcatctctgtctttctgtctgtctgctttatctgtttctctttatattggttttctcttcttctaggttcacaggrtagcagaggatctccatttccagggtttagctattctttaagacacttgttaaaactaacttttttttttaagtctcaatgtcarcttcttggaagcttgaatctcattagccaaacttaggttgyatgtcagatctgttccagattatcagtgtacaggaggaagtagtacaaacttggttgtcacagaccactccctatagaaaaaggtgacatttagaaagtttctrtaagtgccttatggggaaagcttaagcagggagttggaaacctgagagaggsgtgatgtctaggtatctgaatctcattgcttctttaggtggatgagtttgtgttagcctgagggagacaggaatcaggaaggatctgtgataattggagagaagagtcaacttcagaattttgtaatgcaaacccttgtattggggttgaattatctgacaccaagaggaagaaagcagcttccctaaactcagcagtgagttgtgatctaaatatttcagtgctcaatattccaagaataatatggaaacgtttgttagattgtagagaccagtacatagatagaagttatcagcatcttctttcctttagaaaccttattgatttcaaagagttaatgcaaaatttccaaatatacaatttgagagtctctgaacactatagtctgattttgaaggaaatttgttagcataaaatacctttaagctatctgaaaggaataattatagtttaacattagaaaatatactacaatcatgctaataggtcaaataagacaataataaacatttcataagattgtgtaaagtcatatgataaaaatrttagcctaatttatgttacaaatacaaaacaaaaaaactagaaatcgaacaaatatttaacatgataaagcacatctttctcagtctataacattttatatttatagttactcttatcaagagatggatcaaacctattgccactattattaatattctatcagttttaaccagtgtgataaacatkaaacaaaaatgacaaagattattactataagggaaaaattacttcatgatgattttcaaattatttgatctcgacaataattatattagaaagataaaaygtaacattaatattagaacattaagacttttctacatagtattaagaagtcattgttaatacatgggaactggaacgctttttttctttggcaaaaattatttaaaatattttggaataaattgaacctgtttgaagacaactttactgagagacatacaacatatttgaaaaaayggagagacatttcttgtttatggacagaagagctaagtatrggaaaaacattaattctttctgaataaatctgtattcaggcatgttataattccagtagaataactagggagtattttctggaattttaatagtattttaaattttaattatgagagtaaatgagcaaaaataactagagtgattttaaggaaaaatattcctaccaaacatttaacacttaagcataatgttaaactacaataatcaatccagtatgaaactaataccagaatagacatgtgataaactacaataatcaatccagtatgaaactartaccaraatagacatgtgataaatgaaaccaaatagaaatagtcagaaacatasaatgatgataaataagtaaataattctacaattgtgtgtgtgtgtgtgtgtgtrtgtatatatatatatatatatatatatatatatgaatttatcatatgataatggtggcttttagaactcactgggaaataacattttattgattaagagtttacagtagattcaactgagatgatttttccacataagaaagtattatccatttgaaatttattttagaattatgtgaaaaagaagcaaaagaataaaagaaaatgtaggcgaaggtttatttgatttgaatgggaaagtttaaaatcagtaaaagaaattattttaaaaaatgccatgtttgattctttaaaaatgtaacacttggatattacaaattatcatgaacataattcaaaaacggaaattataaggattcattgggggggkgttgtgtcaaaacatgaatatcctaaacattaaaagagccacatgaattgatataaactatgcaatctctaagaggtcaattgacaaaacttgtaaatgttaataaacatttgaaaaaaatgttaagtctcacttataatcaaagaaagtccaattcatcaatgagagactgttttccccttatcaaatttatgaagacttaaacatttatagttactaaaatgtattatattgatcagcattgtttttttggagatcatttgcttggtacatatcaaattcttattttcttatttctagaaaggtwttctaagaaaattattaacagtaattatatttacagtaattcattgaaaaaaacaaatcacaatttcactttgtttttaactaaaacccaccaacaatatattgtatagtataaaatcactctagttatttttgctcatttactctcataattaaaatttaaaatactattaaaattccagaaaatactgcctagttatttctactgggattataacatgcctgaatacagatttattcagaaagaattaacgtttttcccatacttagctcttctgtccataaacaagaaatgtctttgttttttcaaatatgctgtatgactctcagtaaagttggcataacactatataatggtgttgactgtgtatttgggatcctaggttttttycccctagttctgccatttttctgtgttgcgagcccatccaagcctctcaacttcatcttttaaatggaaagattatactaaaatgatctaatatttgagttctcttccaggtctgaattctctacataatcttttaaagtcaaaggcgttctttacaagaaaaaaaaaatagatgcctatcagtgttcttattgtctttctttagtttatgttcatgtttatctttcataaatcatttatttattttacatatattttattgattctcttctaaggtacctaatttttacaagagtgctgtgtcttttaaaattgagaatacacagattaagacaatgtggttctgtgagttgtcaaatttcatagcttaacagtggaggtacagaaacctgttactaacaataattcaatttgataagtgatatgatagaggcatgagcatttacaaacacagtataaggttgagattaagaaactacataagggaagcttaaagattacaacacagagagcaagtgacatctaatttaagttacaaatagaaagtgacatttcttctggtggtcgagatgtggaaaaggtattcatgacagagaaggcagtttaataatagcttgaagacagggaagagcattcacattctaagaaagttgagcatccactgtggaagaatgtaacacagtggttgtgggggcagtcaggtgatgagacagtaagatgagcttggtcctggttagaaacctgtgccragtttggctttgaatttgacacagcagggaaaaaggaatggagctttttgagcaggacagtgaagtgctagggtaagtgttttagaaaagaaactatggcagcaatttgaaaactgaagcaactgagattaaaggcagsgatggtatgtttaagagatagttccagtagtcacaatgagaaaatagtatctaaaataggaaagtaaaggtacatgtgaaatggaaagaagtcaaagatagaggaaggaaatacagaattatttgaatgatgactctgttctaggtactgtgctttgactagaaaccaaagaagtatcttaacttccccaatgatctctctttataactgtttgtgacaacctcattactggagataattcagtattttagtatatatactattgatatgatcaacttgacactactttctatttcatctactttttttttttttaattttttaagagayagagtctcgctttgtcacccaggctggagtgcagtggtgcgatctccgctcactgcaacctccgcctcctgagttcaagcaattctctttcctcagcstccccagtggctgggactacaggtgcatgccgccaagccggctaattttttttgtattttagtagagacggggtttcaccacgttgcctaggctggtctcaaactcctgagctcaggcaatctgcccaccttggcctaccaaagtgctaggattgcaggcgtgaatcatcgagcccgccctcatctacttttataagtagaaaatgagacagaaattcattatatggaaaaattgacakaaaacatcatctcttgaagttatgrtgcataatttccttatgattaaatttacttgtctagtaaatgaaataaagtcaaatatgattgattatctgttgatctaaaaataatatcctttaataattgtctcattagaaatacaattgaggaaattaataatttggaaatatgtaattcttgaagtctctgcttatygctatataatcaatattactgtatatacattcactttttaaaaatttataaatatttttagaaatgaataggtcaattcacaagtaatttttttgtttctgatgaaggaaacatcaagctagctgtaaagtattaatcttacccattaaatcaccatgaaatttagcactgtaattctacctgcctctgttttctaaccgagtgaggtgttaaactgtggggttttcaaagtctgatttcttttatagttttgaaggacaaggtttatcaatctcttatttctcctttaaaatataaggacttacatgtgggccaagactgagccagcattgaagaaaagcttgaagcaaatcagtttttactctagctcttcctagagtcctactcaacttcatccattgtgttgggcttcttttactcattctttatttttgtaattcctggtcttcttcatcacatttgaaaaaaagcaggatgaatgataaatcctggagagaggtggagtaccatgggcttaataattgagggctgaccttgggtctaaactgggatgcagtaatgagccttgaatgaaaaatgaggaaacagatgtaggaacagagaagatttgaggtggtgggaaaaatttctgaaggagtttatgtctaatagtttgtattttttctagygatcagaaacacaaattttatactcagtttgaatctagctttacaacattcaacaccttgtaatagtggccaagcaacaaaacctctatacatttttgtttcctcatttataaaaaaagctgataaggatatatatactaatctattttggtttcctatgaagtttaaatgtaaggtgatgatacatagacaatacttaaaaatatataaactgtacaatatatggagaatatttagactgcttgggtcatcttacaaaaatgatgagatgagtgggttgggactgagaacttgagaatctttagaaagatgcagacttagaaagtactacatataaggattagtttgggaggtgaaaacaaggcaggagttggaaaggatgcttctgccacagcaccaaccaacagggtattttcagcagtgccaggtccttggatataggaacagaaatgtgaatgtttttatgacattcttaaggtaaataggaaagtactttactgctgagatgggcatctaatgaatctagaatggaccaggtgkggttcattctttcattatttcttcttgtttcttcaaaattatatattactttttttattgatggaacgtatttaatggaattgcgcccatgttattagkgataattattttcttagcagtagcagtattttgcttcagaaagaatctactcaaaaattataatggagacttgattattttttctctttaaatctgttaacttttataattacattaaggtttaaacacaaaattagtttgaaagtgagggacaggggctgggcgcwgtggcttatgcttgtaatcccagaatttgggaggccgaggtgggtggatcacttgaagtcaggagtttgagaccagcctggccaacatggtgaaaccccatctctactaaaaatacaaaaattagcccggcgtggtgatgcgcacctgtaatcccagctgctagggaggctgaggcaggagaatctcttgaacccaggaggtggaggttgcagtgagccaggatcccgccactgcacttcagcctgggtgacagagggagactctgtctcaaaaagaaaaagaaaaaaggaaaagaaagaaaaagtgagggacattaatgaaaaaattcctttaaattattgtgcctaattactatgcttaagggattttgattttcccagtcttttggatgtgtttaaaatgattataaaataacttttgactcatataaacaccttgtctctagctaagctaagtgaacaattactcaattttaatttaaaaaatctgtaagtatgtatttatggtatttaatgtgcatatgtcaaaaacattcatttaacattcattaaatgtctattrtgtgcccaaactgtgccatttgtattttttctctgttctctcacttcttttacttcatcttcctttatatcttaaaattctttttctctcctcttgtcctctttctccccagtatttctctgtttgcccttgtgatcactcagtaaccgagagagtrgtaagaggctaggatcgtgaacttttcagagacagacatgagctcatatcctagctcttctactaatgttgtaagatcttggatragttatttatattttataagcctttatggcctcatctttggatggaaaaaataataatacctagctcatagctttattgtgagcatttaatgagataattcgtgcttaagaacttaacacgatgcctggyacagtgtaaatatgcaataaatggtaactattatttttttctgctcctgacaataaaccctcagtatatatttactgaatttcaagcatacacacataaaaactcaccaaatacatgcccatccacacaaattcctttacatgccttagatttcaaagcatctgataaatctcctgtaatcagtaatattgtgctatctgaatttaatttcttatttcttcaaggtgttattcatctattcccaaaaggtttagactttttagtttgccctttcttttttctcttgcagtcacctcctgaacccttgatttcttattagaaccttagggtaagatatgggagtaaaatgacctaaaacctatatgaatatatctggcctcaagtaaaaggataggatagatawgaaggtggaggttgttggttgaaaaggtgttcagggaatgtgtactagaatataatacacctcctagcttaagagtctcttcagaaacttagtcgttgcctgggaaagagaccctctttcctttgcagagttaaactgttgccctttgatcacacgcaactcaatcagagaaaagtccttgtagcactgcccagctgactcagttgtccatgctcacagaacagagataagtggattctgcatgacagaactacttaaaagtcatatgccctatttatttaaaaaagtaattcaaatagaaatgaacattttggcaagtacaatttatactcaatcctgcttaagaaagctctaattttccccaggtcttgttcggcttttcgttgttgttaactttagagaaagtataaaatacatacagaagagtgcagtaaatctatagcttagtgaattttcataaattgaaagcaccccacacagaatccagaacaccaraacaaacccccaaatcctcagctggcacctcaaaatcctcctgggttctctattcctcattacaccctcgccaagaagtcgctctcctaacttttgatagcacagactaggggttcttgcttttaaactttatataaataaaattgtataatctgtacttttaaatgtcyggcttcatttcacagcaatttttaataaagataaaatatatttctaccattatctgtctctattaatgttagattcaattatttaaatttactttgttagacattcaatatttaatttttaaagctgaagaaattattttatgaaataacatttaatatctattaatgaggtttaaatttataaaggtttacattttagtacaatacccataatttttttgaaactggtaaagaaaatattaccttcatgaaccttctcgtcttggttttgttatygtcattcttttaaataataaacttcattttgtagagcagttttaatctcacagcaaaattgagtggaatgtataggagtatccatagttctatgttgaggttcattctctgacctaaaagtcctctatcctccacctatctatattttcttcccacctcatctctgggaaccattgatcttttaactatctccacagttttgccttttccagatgtcttatagttggaattatacagtacatagctttttcagatttgcctctttcagttactgatatacgtttgggtttcctccatgtctttttatggcctgatagttcatttcatcttactatyattgagttttaagggctctttstatattttgatatagttgtcctttatcagttgtgtcttttgcaaatattttctcccagtctgtggcttgtcttctccttctcttgaatgtatcttttckagagcagaagtttttcattttaatgaagcccagcttatcaattctttctcttataaatagtgcctttggtactgtagctaaaaagcatccccatacccagtgtgatttagactttcttctatgttattatcgtctaatagttttaatagttttcccttttacatttaggtctatrtgattcattttgagtttgtttgtttaaagagaataagrtctgtgcctagatttatttatattttttttgcatgsggttgtccagttgttccagcactatttgttgaacccatccttttttttcacttagagatttgaggatgaaacttttgcccatactcaattgttcaaatgtcatgaaaagtgaagtcaagtgttctttgtagtcagaattgtgtgtgtatgtatcattgttgttgttatttttgtgattgttgggactgaaggaacataaatattgtctaaatgatgaaataaataaaaactaataaggttgaattgaagaattacccatggaaaatattactgcataggatttattggctggctgttgagcacctgattaatccatatgaatattaaatgtaattcctgaaatatttcatcttctaggaaacagcattcttacatctgtttcagtttcaattgacaccatcagaaaataatctaatcccgtcagtctctgtcctaggcactgaggagaaagaagraaatcatactctcccagctaattctctagggtagttccaaagtactaaaaacatcagtataaggttaccaactttttctttctcttagcatgtaattgtttcattttaccagggaggaaaacacattwgcttttcttcacttagttgttaacgacagctgtcagagttgtcacacatactagagtcaataaattctagagtgctaaagagacatttgagaaaactgcagtgttcttgattgtacattgctcctttttctaaaaataagtgctttctgatttttctgtccccgtatttattctgaaatgacatcagccgtctgcaaaaaaaagcttttgactgacatttcagacattttttccaggtagtatttaaataagaattacttgggtatatctctctgatccttctagataaacttcagccaaaaccataaagagaattgacacttcttatacacagaaactatcttggggtgagggagaggaaaggcattttcactgttaaagactgcaattaactagtagatttaaatgagaaagtttttcttttcatcttaaacagtctatgtgcataggcacaaactatcagatattgtttaaaaaaatgagatttttattgcaatgtatgcataatactttctttttatacctttacgggttatgtgcttcatcagttttgcactatgtgaacctttcaaatgagctacaaagtttaaatgatactactttggacaatgatatgctaatatatgaataaacaaacaccattttgtgttggattttttttttctttttagcattattgaaaccatcttttggcttttgagcatgatagcaatgtgctttactggtactgaagcagaaaataaccagtccataaattttctagcagcctccagacacaaaatgtttatgaaaataaaatagcatattttgcaaactccagaatggtttcagctgaatagctttaagtcctaccacaggtctaactagaaagtgaatttataataacaacagcttttaagtttacaatggagtgtgtgcacataaacacacagctacctctctttatatagaaatagaagaaataaataaaaagaataaaatgatatatgtaaagaaaggatatgttttcttgccaatgtcaagataaatttttctaacttcatagagatattgagtaaaagtagattttgaattgcttcatatctttgaacagtgactgggataaaccaaatgacatttgagcttgtgttagcttttggctggcatttaccgaaaatgtttccagagccagttcactacctatattgttattattgtttttaatcttaagaattgaacaagaatcaaatatgctcagagtactgtggacaacatctatctwctttactacattttaagagcatcataatttaggcatgatactgttgcagattaatgtaatgagctattttaaaactttagcgatttattgcaggtttttaaatactgcattctgaatggccccatgggaaaggtgtttaattgacatatacaagtttaggtattctatttgataayacaagggactatgcymacagattcaatctaacataaaaaattaaccctgtgcatttcaagcgttccttgaaataataatacctgattagcctatccatttctaatgtttggtttgaattaggaaaaaaaactgttaaatgccatatcattatccggcggtggttccctaagattttaagtatttctctttgtagacaagggaatatgaatacttaatcaccgtgattgaaaagtctttgcatagtttcctggcaaaggcaatgatatcacaaatacataaagattgatgcattccagtgtggattcagatcacttaaaatgtagattcggaggggtagaataaaatacactatatggcacttagaaaaataataaattgctttaaactgcctgcctattttgtattttttccctatcccatgtttgaataataaacattctttcagtatttgaggtggaaaataatctcatcatttgggatttatattcaaactaatgtatgtatrtatataaagatgataagctcctaataagtacctcaggttttcttatttcaatactcagtggaaaatttctttgatgataaatttaaaatttaaccatattaaatcattttaactgttaatcatcttgaattttttcaaattacaataaaaatttcagamatcttaatgcttttagttttaatatgtgtgtgtatgtgtgtatatacatttgtgtgtacatatatgtgtgtatatatgtgtgtgtatatatacrtatatacgtgtgtmtatctatctatatatatatawgcctgtgtgtgcgtgcgtatattctgtcattagccctaattgtcctgtgtagtagagcarctaagagtgttattatgccatttgacaacagacatatatatataaaatttaaatatagactaagtaattcttcaaggtctcaaatcctggctctaccacttaactaggtaggtgaactagatatatgcttcactatatttaagactcacagatagtcaaggaattgggactagatccaaaattttcaattctatgttcaatrctccaagtatcaaaggagctaaaagaggacattgctctgamgatagccaattaaaattgctaaatctgcatccattcctcaagctagtcattgaacagattattaatcagtgcttactgtatactaggcattgttaggagctgaatgagcaaaccacaatycctgtcctcaggaggatgcagtttagtaacacatatacttaacaagcaactacaaaatgtaaagtatttccatgcagaaacaggatattgtcagaggaggagagtgggactaattaggtagggaagtcaaggaaagtgtcaccaagatagagatatttgaactgagtcctgatttgtgagaaggataagagcctaggaaaagctggtacaaaaacttttagacagaaaagagatttgtgtaaccatcatagtaaattctcttctgtcatgggagtcagagccctttgtgctaaaaagtatattatttcctgaagttctcaaagtatgatttgctctttagagttaaaatgacacatcatctagtaaacactttgtagaaacccatggaaatccttatggctattctcacagtgtttagggtccaggcatgtcttctacatgagtctgtactataccctactgtagttaggaagtactgatttttaaagtgtttccttgaagttcacactgtgaacatgacactactgaacactgaaaatattttgtcttgcaaatacctcctagattttaattgaagcttctggaaagtatagcatagcaaactacatcggataacaactagtcaaatgttaattaattttcatagtcatttttttttagagacttggtcttgctttgttgaccagactggagtgtggtggcttttcacaggcatactatagtgcactactgccttgaactcaagacttcatgtgattcttctgcctcagccttctgagtaactgagaatacaggcacatgccactgtgaccaccaatatagccattttaatgactgctgtaagcttttaatggaaagtaaatgctctccacttgatctcatcattgaattcctcccactccatgcaaggaggaagaggttgaattggatgggttagatttgaggtttaactctttgctgctgggtggagtcatcacctggctaaaaacaagtgagcaaggctcttgttggaggattccctaaaggaccagtgataatgaggtagtgagatgctctctctaagcagttcaggcctcctagcttttcttctaaggatgtgctttctcacatacagtggctgaccaaagatcactcttctggcctgagaaggcctggggcagattggtccagttcaactcaaaattaggccctgcttatataactgagtcacttttctaactgaaataggggcaaggagccctccctattgtctgttctagtttatgaattttcactatggagtttcaggccaaagtcatagctagtaataaagtgcaatggtgccttcctttgcctcttttgtgtgtatgtttccttggagacctccacaggaggaggattggctaagccaaggaaggacttgggtattcctagtttttctgtctaaataatgcaagttgcttacacagctccaattaatgcaagtcctctgaagagccccaaattaactttaagacaaggtaaatttaactacatgtacatacataacatgcacaaggcaaacacacacacaatagaaaaggtagtaataggtataagaaatatccttctragaaataatgtttaaattgtyctctccattgtaatacagagcagaaacttaagaatgcaacaatattttcttttttttcaaaaaagaagccatacaaaaaagaggcacagaaaatgactcttctgttgactattgatgttaagtaaaattcctagatttaaaatctcattttgtggccttatttagtcacattggttttctttcattctttctggaatttccaatggaaaatgtgagactgatacaagtgctaacatttattgagtccttatgatgtgtcaggtagatttctaggcattatttctatattatttaatcctcaaaataatataaagtagggataatttttatccttatttctgcagatgaggaaactgaagcatacatctagtacccatacaagttaagtggtgaagccaggatttgtgactttgaagaatcacttcacccttagttgtagtcctaattacagggtgattaaggtaattactatggtaattaaggtataccacctctaatgataactgcttttgtagaagcaggggaaaacttattagtgaaaaaaatatgtgtctaaaagagaaagcaaagaacctttataatttagacagaacactgggactaatagagtcagactagttctctctaagtgtgagattatgtgaagaaaagtgaaaacaggaactgaggagcaaaagccaaaaaaagagtcgttttaaagaattggaagacagtggctaaaacaaatatgaagtcaaggtaaatcttttgaaagtttattacagtcatatttgaggcttggatattaacattcatgacttttttgaggctgaggagtggacattaaggttctttmcagcccattatttttttcttcgtcggcttaattgaggtaaaatatagacacggtaaaacccatcaatttcaagtgtacaatttgaggtttcatttttttaacaaatatatgcagtggtgtaaccaccactgcagttatgatttagaacatgtttattacctcaagtgttctctcctgtctctctgcagtgtcatgtcctgaatcccatttcttagaaatcactgatttgctttctatcagtagatttttttaatttaaaaaaggtaatatgaatggagttatatcttttgcagattttgtgttctttctcccacttagcacgaagtttttaaaatttacctgtgttgtgtctattggtagttcattcattgcccacctccctttttgyatatcacaatttgtgtattcattcattagttgatggacatttggattgtttccagttttccccgtgaagaataaagcttttatgaaagttcaagtacagctctttgtgaggatatatgcttttgtttctcttggctaaatacttgggaatagaagttcaagattctatggtaagaagacatttaactgtacgagagactgacaaactgttttctaaagtgaccataccattttgcatcactaacagcaatatatgacagtttcagttgctgtactcctctccaacacttgatattgtcatattgtcagtcattttaattttagctattttcgtgagtgtatagtcattactcactgtggctctaatttgcctttctctggtcactagttatcttgtgtatctttctataagcttattagccattcctatatcttctctgatcaagtatcttcaaatcttttgtctatttttaaaaacaattatttacagcttccccttgaactgtaaaaatcttcattcattctgaaaatcagacctttattaattaaatatatgattatatatattttatataaaaatatgtaatatttgtttatatatttaacaaatatttttcttttcactttcataatggtatcttttgagaaacattttcaattctgatgaaggctaatttgtcaactttctaaaaatgaatcttacttgtctttcatagctaagaaatttgtgcctaactcaagcttatgaatttttttttcattgtttcttctcgargttttatagttttagctcttatatttaagtctgtgatccttagaaaggtgattttatttcattatttttatttttttgagatggagtctcactctgtcacctaggctggagtgcagtggcatgatcttggcccactgcaacctctccctccsggttcaagcgattctcctgcctcagcctctggagtagctgggattacaggcaggcaccaggatgtctggctaatttttaaacattttttggttagagacgaggtttcatcatgttggccaggctggtctcgaactcctgacctcaagtgatccacccgccttggcctcccaaagtactgggattacaggtgtgaggtactgtggtacctagccagtgaagggtaattttaaaatatgataagaggtgaagcttgaggtttatcttaaaaatatcaatattaattgttctactaccagtatttgaaaagacygtctcccattgtattatatttatacttttgttgtaaatcagttgaatacatatgtgtaagtctatgtttggatttgctgtcttgttctaaaggtctatatgtgtatgcrtattctaataccccactgactagattattatagttttatattaggaattgaaatcaaatagtgtaaattctctttgtttttctttttaaaaattactttggtattctatgccttttgcatctatgtatsaattttataatccgtttgtcaatttttacaaaaaaaaaaaaaaaaaaaaacccgacctgctctgattttagttggtattgcattgaatctatagatttggagagaattgacatcttacggttcagtcttcccatctatgaacattatctttccactatttagatgttttaaaatttatctccacaatgttttaaatttgcagcatgtaggtattccatatattttgttaaatttctctttatttcatatttttgatggtcttgtgagtgcaattatttaaaaaataaccatttctagtttggtaatggaaaaacttatttttgtatgttcactttgtgtccagcaatctttattaactcatattttttcagctgctttttggtagacaccttaggcctttcaacttaatcatattatctacaaatgaagatagttttattacttcctttccaatatgcctgatgtttaattcttcttcctamtttatgctactggttaggtcttccattacaatgttgaattgtactggaaaaacacaaactaagacatccttgtcttttttcttatcatagacagaaataattacattttttactattaagtatgatgtaccaatataggtaaatctagaaaacatgagtgatataagctagttgtagaatagtgtgataatatgacacaataaaataatataaaatatatgaacattaatacatactatatgtttttgtagatagaaacttatatgcaaagtgaatacaaatatacacaggaataataaataccgaggtagtgtttatctctggaaagcaaggaggcgatggagaagaattggactgaaggaaaatttataattcttcagttgtatttgtatggttytattactcaaagcaaaactgaaagaaaaagtatccatagtatttatgaaagtggagaaaataggaagaatattattagcatcctgagaaaggtaagcataaagaaaatacagtgaatactgtatatatttttgttagtaatgagaataaggttggttaatatgttagcatcagaatatgartagtattaaaaccaaatagaataatttagatttgatagtgtaggcaaaagagagtcattgtagtttcttgatgtgttactaggcttatattctagtaagtcaccatcaaatggattgtttggtcttgattataaaatctttatccaaaccagggaatttgatcttcttagagggactagtcaaacaggtaacatgaatgtgtaaaactggcagaatgcatgaccacagagcataatagggcaagtggctaggaatgcatacctttaaatgcctgaaaatcaaatgtaaatgtggtttttttgtccaacaaaatatttttgtagttgaagttatgaagcatgaaacagtaatagcaaactacagacaagtagtctgtctttgagaaagtaacgtctatgtatacggctatcctcttgtaaccaggcattccaaggtaaattgaagtgtgatttgacatttaatggtrctgaatrtatgttatgttgaaaatagtgtaatatagtgttgggagggcaccaaygatacatttgactaacgctttgccctaaacatgaaaaaaatatatttcaattaggagttaagatacatacatttaaatataataagcaaaacatattagcatgaaaccattaacaacacagtaactacacagtggtttactgtgttctttcttttatattcagtcattataaactacatagaagtatgaaactgaaaaattgaagtataatttatattgcatattccttgtatgaaagatcattgttatcaagacatttcgygctttattgagcaattttagatatttaaatatctaaaaatttaaatttaatatttaattaaaaccaaatagaataatttaaatttggtagtgtaggcaaaagggagtcattgtagtttcttgatgtgttactaggcttatattctagtaagtcatcatcaaatggattgtttggtcttgattacaaattatcaaaaccagggaatttgatsttcttagagggactagtcaaacaggtaacataaatgtgtaaaactggtgaatgcgttttaatactatctaaaaattaaatttaaaaagtttaaattttgctttttgttactaattataaaaatttttaacttttagggtactgttatgatggtggtctcaataaagcaataataatatctgaatcagaaaatttcatttctatattctagataaccatggatgaatttcctggttattcataaatttagagtcttccactattaaagatttgtaatsttagggaacatacaatgactcatgtagtttatgaatataatttcagtaatatgagtactatggcataacacagaaatgtctccattgccatggccatacattgaaggtttatttgtataatttttgtctaattcacaggaaatgtgatatttaaatacatatgaatcttctaaatttttattttgatattttccctggtgagctgaaaaaatgaatgtacttcatttgttttaaatcatcacattaaaactctagttgtaatattttataatggcccctttgtgactttaataagcagtattctcttasctttctttagggcaaataaatatatccaaatcaaaagagaattttcagaagatataaatttgttatatatctattgtacatataaatttattatatatctgagttgcttatgaattatagagrtgccataaatggaatacaggtacacgtaattctaaatagctttttattgtgagggtggtatttaatattcggaaggagagaaacacaaggtaagaggaataatcttgtgaaaatccagtgtrcaagaagaaattcaataagcatgacttagggagaatatgtttacaagcagaggttgtaccgtggaacagaatrgaaaagaatgaagcttcayagctgtgatttatcatcacaaaagaaaaagacaaactattcacattttatgcctagtgttaatattagggggaaaaaaacccaaaagcaaagtacaaggtaatacattttcattaattgagcagatrcgattgaataatttyagttttggacctatgagagctctctgtggaatattcaagtgaagatatttaggaagcagttggacatatacacacagatgcagacacacacgtcacacacacacagaagagaaacaagtataatataatataatataatatatgactatgtcttaatatgaataacaatggaaattgtaagtaccctgacaacagaaactgtgtcctggtttcttccactatatctggcgtatagcaaggactgaaaaatgttgaataaatgacatgaagatcattgaatctatacagataagaatcaaactcaacagaatgaaaaatagcattgccagagaaatgatcttttttttctattaaattgtagagaatcctaacatataaattctaaatcggcagttctcaaacattttggtcctagcaaacctttacacttaaaaattattaaggattccaggaagctcttgtgtgcattatcattgattatttatctcagatattaaaagtgagaaacatttaaaatgtgtttgattcattttaaaataataagttacattctaaaaataataataaatcaattacatgttaataaataacatattttaatgaaaaatagccattgcaaaagaataaaaaattgtgagaagagtgatattgtttgacaattttaaaaatccctttaatgtctggattactagaagacagcttgcattcttatatcttccactgcattcaatctgttgccatgttaagttctgggtgaggaatgtaaagaaatctggtctgacacatatctagttgtaacataagagtattttcataacattttcagataatctttggtattacaccaaaatctgacaaatattgtttgataaagattaatttcagttttctgagacagttcaataaacttaaaattcattggtctatgttgtgctttaaatagatattttaatcatagaagctttgaaatatttgcaaaatattggttcactgagttatgtatctcttttaaatgttggaacattttattgtataataacaaaacattacgctagttgatatcaccaccagtgtaatcagaaaactctgatcagaaaacctggacttgatttgaggagtatgcaagttttccaaaatatttttatacgaaggcccaaattttatcattggcagaaaattctgtcagtttttcttgagctaatagtttaagtttattcatttttaagaaaaatcttccaaacacccaagtcttaataaccatggtttatatgtcagtcgtttcttcaagaaaaaacatgccattaaaaagatggctaattcagatcacaactcaatcatataaatgctcccccaccyctcctgagtcaagcgtcatgctttggtctggaacagaagtgctttagttttacatttcactgtttttttactcacacatcaaggttttaatcaataaattttacttctttatcttggccattcttaagkgaaactagcaattttttattttttccattgcaagtgtgtagcagtgaggaatatgatgactactagtgtagttcggcaccactgtctgcctcattgtaaaatatcagtgattttaccattgttgctttttctttttcttatttttttttaccataagtgcaaatgtcaacacaatggaagaggcacatacaattttaatattgctatgaaaatgtttttcacctggcagatcactggaaagggtctkggggccccctagggatctgtggactacattgagagccactattctaaataatttctctctgtaagtactattgtatgaagtaagaagaaacagactggcttacaaaaacatgtaaacaacgtatactgttagagaagcaactcaaatattactttgattgaaaattttaatacctccacttggtataattttttaaaagtaatactaaatttttaaaagtaataccaaaatagagaaaatgttatgtttagcaatggctatgtttctgttccattttcrctccaggtgcatattctttttatttattttttattgctataggattgtgattgaaatataatttagtatagtttaagacacttgtctaaagggtcagcatagggtatgatatgaaaagtggatcattttaatagcacatccactgaaaatcaatctgtgttcctgagacattaccttatatgtcttcaaatatttaaaaatgagtggtggggattttactggatctgcattatagcacattaagctataatacctttatatgggaacatgastttttaaactgccaatcagttgtatcctttcactgaaatcgtactacatatgtcctaggctcagttatgcactagtctacttttcagatatgaatggctttatgctttatttttcaaagcacactttcatttagtatataccatacaatgagttaaagccattaggggaggtaccaagtgattgaggtgagctttgggctccattcattgcagtccccagtgcataaatatgatttcaacaaatttgtgttgaatacctacaatatgccagacagcgggtcagcctctgttggggaagtggtggaaatgaagatatgtaagatagagtcccttcccscagaaarcttgaaatctaaaggaaagccagccttataaataggcaattattaaaatacatcagaattaactagtgaccagaattagtaattaactagtgaccagaattagtaattaactagtgactagaattaggtatacacatgattgctttatgggagtccagtggaaggaataatgtattctgactgagaaacttagagaaagaggaaggagtattttgtcaggtcttacgggagtaagtgagattttgctggatggggacttggtttgtcggttatattccaggcagaaggcaggctaagagtctgggcactgagggtaaaatatttggcgtggttgattaatggtgagttggccaccatgctccgtaggagaggtggctgtgcgggctggccttggagaagtggtaagtgtggtggggtgggggmtgtgaggttaatccttgaaatgcttacccagatcttttttaaagtcccaaattaaaggaaataggatactgttgtaggactgctttgcagtcctaaaacttgccttcaagctgccttttcccttgccttttcagcctctctggtggtacatagacttttgagcatagccagtatgtctttctacctatataaagttaaaaaatgtgagaataaggtttaaacattggcccaattttgttacaatattttaatttaattactgcaacaatcataataataatacagttgaccctggaacaacacagatttaaactgtatggatctaatggattttttttcacccaaatggattttttttcacccaaatgcagatggaaaatacagggtttgcaggtatgaaacgcgcctgtactgaagaccaacttttcctgtgggtggctttgcagggccaagtgtggaagtttaatatctcggattttggtgtggggggtaggtgtcctggaaccaattccaagcttatacagagggatggatgactgtaatggatgtgttgtctcatttaatcctcctcctcatcactctctgaaggtggtactcttgggatccccattttacagacaaggaacttagtcttttaaaagtaggtgacagcattgggatttgcatccactcttaaacatcatgctgtactgcttcccacaatcttgtgaaagtggctcctattatttccattttacaaagaaggaaacgaaggctcagggagattaataagggaaataatttccccttaktattatactatcgtaaataacaaagctaggattttagtctctatttgtggtgctcctcagaacttttgttcttgtcatgacatcatgcygtcagctcgtgttagaccrgtcttcttgaggacatttcagttcttctgccacattcaggaccagagttacaaggaaaaatcctggcctgttcccagggtaagcagagaggagagcaactgatgcttacaaaattctctacccttgcagacatatcatgtgcatctctgaattaaaagctattgtgtgacagtcctcccagtggaaaaccaaatgcttggagaatatgattcctttcctctgtttgaaaacagtgttttatttttggtggtggtggttttctgcaggtaagcaaggttagtgacttctgtgtattggaaacagcctcattagaatcaactcgggaacactgaacacacacacacacacacgtacgcacacagatttacggaattctgattcagtggatccygagtactgccagtaatctattttctaaaagctttttggtggagtcagaccagaagagtgtaatggtgaaagcctactctctgtagccacrtctcactggttttattcacagccatataagcaagtattagttttatacttgcaattgttttctatatagaggatagttaattgcccatattgattttatttatcactaattcttaagttcccccactttcaacttctcattttcatagtaatatcagttttagataggaagatgtattttgggttattctattgttaatatcttatgtggtttactgcaggaagttgttagagtttctccgttgggaaatgtctatgcttcggtattttcttgaaattctacattactacttattatggcaggttaacaaamatacctgaataacgtgaatctttaagacaagactctgctgccaaaaccacctgtggaaagaggaatctctcagcacattttcatgacctttcaaatcaagaattgctgagttcatgtcagaaatgatagagttttctttccaaagcagtgaaactgaggtawacaatataaatgatttgttcaaggtcagggaaggagtgcttacttgagtctcaatttgtgacttgggaccaccttttgtttcagttatcagcacagatttccctgtttagcagaaaaagctcagtataagaaagattttatataaattatgcataaagtaccattttagtcaagactttaaaaaatgccactgatccttttcatacctgtcctgaaaaggttcttattttctgtcttcgtactgtttgtacaaaccaattcaatttgacttgatacaagttatctcctagggaataaaaaattgccccatrttaataatcagaggtgatattagcttgtggcatattgttcagtggagtacctattgtgattgatatcagcttgagtcttgagaagcatttttattgttcaggagctaggtaaacagtatgttaattgtgtgactggttgcttttatcattctcaatgttgcctggcatttatttatgtgaaaaatgtattgtttggaaaggtcctttgggatctctcagamcaatactatataaatgtagaccattatagttattgatacagtcrtgtgtcacttaacgttgggggcatgttctgagaaatgtgttcttaggtgattttgtcactgtgcaaacatcatagaagtatttatacaaacctagatggtatagtctgctacacacctaggctatatggtacatattgctcctaggctatatacctgtacagcatgttactgtactgaacactgtaggcaattgtattagtattagatacacaatggtatttgtgtatccaaacctatctaaacatagaaaattacagtaaaaattcagtattatgtatatgtagtctgttattgaccgaaatgtgtgtggtgcatgactgtaatttatagctgatgttaaatcagagttataaacaagcattagtaataactgaaaataattatacaaaggggttgtgggaggatcaccaccaatctcaaaaaggaataatgagagaagattgcattaggaaaattgagaacagtgatttaaatctcttggaaagaagtgatataaaacactgctattaaatattaggtaactaaacgtaacaccgtggtcttatcaaagatgtaagatgctaagaggtgaatataacatatttatttatactttactaatataaactatgttttgtrtgtggtgtgtgtgtgtgtgtgtgtgtgtgcaaacacaattttgagtaactttggatggaatctcaaggtgattcactctaattcccagctactgctcctgttctcactgctactttattagaacttttgtcatcagattagaatggggaaagggagtatatcttttcttccattaaaattgatttaaaaagaccttatttctgcttgaaaaggatgttgccaacatatgccttgtgaaagaattggataataataattagtccttttaaatgtagtggttgatatgaggatgtctgcattcttctttctcttctttaataaactgtttggaaaactgccctacactacagccacactgcccatttccctcttcagccttctggaatctggttccttctccttttcttcctccctgtaccaatatttccttcagatctgatttgcacgttgctgaaggctccaaacatttgtgctgctcatcctaagtyatgttgttmaagcatctgagacacttaaccttcttggagtttttcatcaacatctgtggatctctccttctttcctcccctactcctcttcctccccctcctcctttttttccttcttttccttctcctcttcyagcaattaaatatttgtagtctatcwaccactcatgctttcctcaacgtagaatttcccagggctctatgctggttcctctgttcttctttctgcatcccccaacccccsactcaccccccacactggtaatcttgaccactcctatggcttcagccttctcttctatacagatgattctcatctctctagaaagatctagacctttcacttctccaactgtatccttcacttggatgttcaactcatcaagttcaaaattaggtgtattaactctcacttcacacctatttcttctcttgagtttctcatcttagtgagttaaacagcatccaacctggtcttccaagtcagcaaacttgaaccagtttaaactactaaacttgctttcagtatttcaccggtaatgaaatatcttgcaaacctgttcttccccactagattgctcctatcttaattatttcagtaacattttattcccctctctctagtgggctacgtgcagcagccagagggcttgttttcaaaacacttctatcatcatactttcctcttgcttacagtcatgaaatagctccctgcagctttcagcatcctgcctcaactccttggcytaacacatcatacctgtcctgaaaaggttcttattgtctttgtactgtatgtgcccttttctctggctatgctggactttgtgattctggaaatgggtcatgcccacctttrtgatagcacatatgttgttccttttcctgaataattctctcttctgtttttgacatgtcaccttttactctttatttttcaaaaccccatttcaccttttactctttatctttcaaaactgaggtcaaaagtcacctctagaaaggcttctctggcttgagatcaccctcgttagtgttagtctgatttcgatgttccacctacatgctcctttatcagtaggtagcacttaccatactgcaattgaattgcaaagttacttgtctgcctccaccctagactacagctttttgagggtgggagtcatgacttacttgaccttacattctcaggacttagtttagtgcatagctaagaggtgttcaatagatgtttgctgaatgaatgaaaaacttaatggtcatttgaaatggctttttgtacgtctggacattgctcaggaagggaatggaaaaattacatactagtgaattttcagtctagtattaaatttaatatcatgagagaggttgtaaccaccttgcccgctgcctagacagagccgatttatcaagacgggggaattacgatagagaaagagtaattaaagagtaattcatgcagagctggctgtgcgggagactggagttttattaccacccaaatcagtctctctgagcattcggggatcagagtttttaaggataatttggtgggtgggggtgccagtaagttggaagtgctgattggtcaggtcagagatgaaatcgtaaggagtcgaagctgtcttcttgcactgagtcagttccttggyggagatcacaagatcagatgaaccagcttatccatcttgggtggtgccagctgatctatcaagtacagggtctggaaaatgtctgaagcactggtsttaggctttacaatagtgatgttaccctcaggagcaatttggggagggtcggaatcttgtagtctccagctgcatgattcctaaaccataatttctaatcttgtggctaatttgttagtcctacaaaggcagtctagtccccaggcaggaaggaggtttgttttcagaaagggctattatcatctttgatttaaactataaacaaagttcctcccaaagggacaggacagcttgaaggttagaagcaagatggagttcgttaggtcagatctctttcactgtctcagttataattttgcaatggtggtttcaaggttatcattagggggagaatgagaaagactgtattttattgaaatggtastaagtggagagatgattttgaatctctagaaactcaacagtattactgtgatgccaacaacattgacttaaagattttccaatgagatgactctttggatatttacaaacataagcatatttggtttcatatgaaaaagctatttacagtagtactgactgcacttttccatttctattaagctgtcttggcatcrtgtagcctcagaggaaatacagtagcaaaggttagaaatatttaaagcagttttttgcctaaatgtaaggagagggacacaaaaacatccagtttgcagttataaactcataacattgacacccattatgtcataacattgacataacattaattaccaaggtaattaatgaataaccttgttcaaattacaggatgggctgagtatatcaagcawgacaaatggaaatgcttttgcttgtttcagcagattgtgtttataaactctagagcaggtttgatccctctttcagggggttatgtttgcacatggcttaagaaattaaaaataaaaatggcttaagaatttaaataggtacatagttgtaaaggtgttgcacatttccaattagtgagaagagaccgtacatgtgtatgtgttaagttaggttrtatttctggtttagcatggcacattctgtcggaggatttcctggcccctggttctggaatagatcacagaattgctgttggtgttgcccatactaactagagtggtgtaggaaaakgccccatttgtgcygagccatgagtcttttgtacccagagcttacatcagccttctggaagaacttaacattaacaatctgtgcacttctatttaaggtattgtataaaaatattgggctcttctggttcttgaattgaagttagcattagcaaggcttcattctcatccagggaaagaaagatgggtaatgcccaggtgtccctgcttcggcttccagctttttactgttcagagaacccattccctgcaggtgctcaaatgggactcacattgtctccatctgtctcttttattctgtgtctctctttgttcttgtgattagagcttttgaattgtgggtgccgtctaaaaaagagtctttgtgttttcttgattttagtctactgcgaggacagagtctttacaatagtaaatagcttttcattctgaaaaaataaataatttatcttaatctcggtaacaacatggcgtcctttgtgtatgaagaagatgacaacaatttacttgttcaattattttcatggaaaaattcttaggcatgtaatccctgcctttaagattcttgatagctactctcaaattgctgttcatagtcatatacataatagtaacagatcaatttatctatcttcccacacattcaccaaaactgggtgttaytatttttcatctttatatacatcagtggtgaacttaattttattattatttaaatttgmatatcattgattcctaatgagatttagagtttttgtatactaattagccattgtatttattcttttgcaaattgcctgttcattactttgcctatttttcttttggaatattcctctgtttccttttgattgtcaaaatctctttgagaatacatacattaatctgttgtctgacatatattttacaattgtatttctgtaattcatctattcatatttggtgttacttgccctacagcaatttaaacaaattgtgagggcccatccatcaagattctcctctgcactttctgtcatgttatgcctagaaatgtgtaacagtcctatggaagatctcctgtgaaaggcctggattggccaaaaatattaactttcaaaaaggtttctcttcttttgtactaccaactctctactaaataagagtaatataaataagcaaaccctcccttgattactgactaccaaatgtctctctttcctggtgctaaacacctttctcttttctcaccactgctcccagagtgcagatgtcaataaaatattttgttttactcttacctgataagttcatgtttactattatatcttgttcacaggtcaatctttgaactgggaaattcrttttaaactaaaatagccatagtaagctttcaggacttttaraaatacrtattttcttgtagctttttcatgatgtcattttaataatgaaacattgaattcatcttcattttgtgttgtaagttatgaaatagacatctaattttttgagtttttgatagccagtatccaaagttatttctcaaaaaactcatcaaatttttttagtgatgtggaaggccattttaatatattattaaaatgtaataatatgaaatattaagaatatattactatacaatattatattttctagatctgctatgaattgtctattttattaatctggctatctttttttgtgctagtatatcattatttaaaatattgccatgatatatgttaatatctaatagggcaagccactgccattagaatgggtttcaaaattttgctggctttgtttttgaacatataaatacatgttttaaaatttatccacttaactggaatttttttaggaataggataaacttacagatcaacttcgagaaaatactatatctgtacaggggagcaatgtgtacattttgtattcaactcatattatctctcagtagtatattataatttttaatgtagttctgggaaattcccactaagtttatggagatttgatatttgctgatgttattaatgtgttatgactgctaattaaatttttctcattatttcaggtaattgtaggtatattaagaagttattgatatgcttaaaataataatttttaagtagcacttttatttactaactgcttccrgtggaatwtcagattatcagttatttttattcttatttsttttacwtgtctaattgcattggttagcacatctrgaatgacatggaatactgattgtgatgctgggcattcctgttttgaccctaatcctctaatactgcaatttttaaataatgcctgctgatctctgatgtcactgttgaccatsctaaaaatgatttctaatttaaagttttactaaatatagatacactataaattttgtcaaatgccttgtcacctatcaacatgatgatgtatttttgtccgttattaatgcgtttatcaattttttccaaatgtctaactacactgttttttgtggaataaatgcttctttgatactgtatattgtttttaatataatattagatttaattttacttaatatttagtattttattgagaaytttttgcattaatatttataaatgagacttagttacagggctttatttttttttcctcttttttttccragcaagccacttatttttttaattaggaagaaagagacactgttcatttccaaacatatagcctgacataatacattattatattatcaatttaatgtatattatatataataaagtaaacaaatactttcacaaagtaaaagcaagaaaaatttgtgctttgctaatctttcttttattacagtttccattaggttggatcaattagtgttaaaatgtcctttaatagttctaacattgttttcactttatcactttatcaggaaggacattgctctttataggtgagttagtgaagaagaaaaaaaagtgatgactaacatgatgtaaatcaggggtgcccagtcatttggcttccctgggccacattggaagaagaataattgtcatgggccacatgtaaaacacactaacactaatgatagctgatgagcttaaaaaaaaaattgcagacaattttcctaatgttttaagaaagtttacagatttgtgttgggctgcattccaagctgtcctgggacacgtgcatgtagcccataggccatggttgggcaaccgtgayctaaacataactgatttagcttgaatatgcctttaaactaaacaggatttttttattcctaaactattcttaagaaaattcagattttccatatcttgaaattttggtacagaggacagtgattcaatggaaagtattctacacttgaaaaaatttaacaatgataaatgaaggtattttccttatgtgggttttgtgatatgctgtaacatagttgagcagaccttcacctaagcagaaattactagctcaaatggactgcacaaataaggataagtgaattttttgatctgctttataaagctctctatacgccatattcacatttttaatgaaacaggaaaaatatgttttcttctttcatatgctaagtgattacagctagagaggttgacctcactaatatgtcttcctctaatttgggatatgaatagattctrctaataactcttaaggcacaattcacacaagatgcaaaattcaaaagaataaaaagaatgtgttaattrgggactttggatttttcttaaatgacttagagatatttgctgttgctcygaatggatatagaagacttaattacataatttcttaatgggccttttaacttttataacagatgttcttttacaactggtcttttatcatcattaataatctgcctgtagtttttcagtygtatagtataaattagtttattgaaattatattaaacatttaatatggtgaaaaaatatattatgataatgtttgttctggctacaaactaaatttaatgactgtatacaagaaataactactagcacatttaagtaagagttttggtgatacttgcatgctgagggattgtcaatatggtagctttccatattccagtttttaccccatgrcaattcttccaatatcaaatgatgttataccctcaaaatagaaaatatatattatctgttagaattctttacagtattgctttaagaacatctcatttaraaagrggaaaatactccttaataatacaaataatatacttaattgattacttagatttattttttatttatggatatttattagacatcatagaaaatgaggaaataataaaatgatatagtctcattgtctctggaaaaatatttatgatagaaattatatgaatacatatatgtattgataataccatgatcattgtaataattgtgcatgtgctggagaaatattctaatctaaatattgacttattcctggtggtattgtggaatatgggaatatattaattgtagaagtcagtaggagatttgggatgcgtagaaatagttcattttggtaataaaatgtcacagaatgcacaagttaagatggtcagtttctggtaggtactttgtttctcttttgtttactaccattgggaatattyggccaatattacttcaatttctccttctagaaaatttagaaattaaagataaatataggaaagggaataggtggaaatagaaatcaggaaacgcaaaaggtgattcttcaaatttctggcatgattcaagttccagggcaaatatttaattcaaagttgggtctagaggcaagtcagttacacaggaagtgctcaggatattgagtggttctctcacgtcctcctgagagtggccagggtatcagagtgaataaaatggcttctctatgagatctctttctaattaatcaatattatagctttaccattgggacaccaggagaagacaaatgatggaaaaaatcttttatatacatttctttccaattgacaaatttggcttaatatgaaaaattcatctaaagtcttcattctttgaggtccctttaagcatataattgtattccaaattaattcttaaaacatgtataatttgttataacttttaacaaggtttgttaataaaatgctgtaatgtttacmaaacaattatattcgagaaaagagatgttatacagatttatcgaaaagagaatttgataactaaattaagtaaatgccaactattatccctaaatgtagatagtaaataacattattccttctatgctgtgtatctaaactacctgtttccctaatttttaatttaattcctcaacattatcttaactttgatatatcaaagtagtaactttctccatattgagcctcatatttaagcagttaccaactattgctgttttgtttatcgcactatatctttcacgttcccttctctcttttcaaatgtttgtgacaggcttctatcctgcctcattcttccacagatacaggttagtgccccttagctacttgatttttcacaaagttctcaacagttccacattgtttacaaaataaaatattcttaatttcctggtctgacatccaggtccccccacagtctaccccaaattcacttttccaaatttacatcctgatatgctacagtgatttctgtatttccagtccagctggtgtattcactgtggcaaaaattgaccttgagcatctctaatcttggatctttgctcaggcattttccaacttcaaaagtgctcttattttattttttttcctatccatacaaatacacatcttttctttcaaatctttgatcaagcttcatagccttcattatgatcccaaattatttcaacttctaaatcagtgcattgctagtactatttctttgacacaatttatggtttatgtgtggaactgttgctaatcttcctagttccatgagtcttacatcatagtctgatctgaatagaagacactcaaacattactcttacattacttctttattcctaagttgttacttttgattctcctcttatttgatcgatgtgttttgtttttccaattgaactttctcagtaaaagatcgtctttctaaactcttgcatatctgatactatatttctattatcttagcttggaacacagacttttgctccagaactctttagatttgtgacattgtcatccagcagttaatgtagtagaggtagcttaggacaatctgatgtccattcctctttagttaaggtctttacttttgcctcaatacttgagagacatttacttattcttacaaacccaaaaataattttgagttaaggcttcagtgggatttcagagctcgagatcctctctctgagatcttagatgaggaaaaagaaatcataggtgacacaaggtaatcacatacaaaagtcacttcatttagggctagtcagttacccagtatctgccaaatgcagaacttctaaactggaaaacacaattaatgttttggaacttagtgaagttacctgcttgctacttccccagtgctggactggtaaaagagtggagaactaagacagggagagaaaggagaagaaatatattacacggcatataggatatgggcaactgggtcttagtttggctgcagacttctggaatcgacatggccttaatttttccacccaaggggtaaggaagctgagatagttatcttccccctcaccatagtgtgaaggccattccctggagttttgactccttggctcttctgtcctgcttagcacataggttgaacatgctcctggggccagatgacattttctggctacagattgcaggtactagcagtgtgaagccatcagagcactctggaatggtgactgaggagagggtggggcagcaatcatgtgggctacaattggtgccasgtgagaaaatgaagcaaagggagggtgaatasctagctgaacttcatacaggtgggaggggacggaatcaggtctttaatcactatgatagcttgccattgcactcaagggctgtgaagcctttatggcagggtgaggagaaagagtgaaggaagctgctacttaagcagtgtggtcagagaaaaagcctttctgaaaaggtcctgtgtgaacagagacctgaaggaaatgaagtggtgaggctagcgattatctcaggaaagaactttctggctagaagagtgtctgacatgtttaaggtacagcaaggagaacagggtgggcagaacagggaataagggcaggcagctgggagcacctcacatagggcccagaagccagcaggaagcctcccctrgaycatggatggtgtccctccttgtcacctgttgagctgatcagttttctgagttgttcatctagctcctgtattgaagtgttttcaaaggtcttctcttcctatgacttttcagaatcaagttttccttgtcttcgagtgtttttcaaagttactgtatgtttttattttcttatttgtgcatttgtgtggacggcccacctctccagagccagtgtgggtatgctgcttttctgagattctttctctgctcctttgtttggtctttcacagattgagaagacaattggaacacaaagctccaagcccagttcctagtatctaggaggctttccttttctgcatcattactgctctgcaatgggatcttttcttctactccygctgtgagccagccagctggggtccatatttcttcaggaagcaaagggaaattagtggttctgcacagatagcattccaagcagcgctgtcagcaagggcacagacaggaggagctttgtgtggcacagcactgtgagaatggccttagttcaygtgtttctcccttccttgatttgctacccatgtgctgcagtcccctactggatctgtgaagagagcactaatggcagtggggagggtgcgtggcggatagtggcagatagattactcatgctgcctttaaagcagtggctgtggagtagacaagttctcaacaattttcttcctggcatttcttaaaatgaggttcacatgcatgactcacttccttttgtgtctatagggcttagtagctccgcccctttcagcatgtcaatcatatcagaatgtaagcatcaataatgtaatcttatattaattgtgctcatgtgtacatacaataatactagtaaaaaactacttgctatacacatcccagctggctgtaatgcccagctactcaagttttcaggttgttaaaattctattatgtcttaaaggttgtgggagatagatattgagtgtggagaggcaaacagcaggggaggacctatagttttgtttttttaggggtgtgtgtgtgtgtgtgtgtgtgtgtgtgtgtgtgkatgatttcagatgagcaagtgttttctgttctgggcaatccaccaggtatgctttaaaatccactttaagccattttgaaattctttccagatcctggaattaggcttactgtaagtacctgctttaaatgaggtatttccttttatgttttccttagtgtttatagttattttagggggaagttagaaaagtttgtatctgggacatctacctatatggaaactgatcccattgagttgttaagatcttcattgtaccaattcattaagcataggtttttaattaaattcccatgtagtcatatactatatttaaaaatcttacattattctgaggcaattaaagttggaatcaaatattttttctaaatatatacagatttcatgtattaatatatgaatgtcaatgatcagcattttttaaaaagtatgttcttaatgcactcaaatgtgtcatacccaacccacagaattatatagaatattctaaatgcagtcttgttgaacctatatattgatatatattaatattgtatgtaaatattctatatttatgtcatttacctacttaaatatttggtttaaatatatttagataatagttaaaattattttatttttatgattaaatacacgtaagtatgtatagaatttatgaaaaagttatgcagtaattggaacatagctaattgagaactatgatatactttgggtgaattttattttattaaagaggaaaatgatatatcaagaatatgtaaatttatattaagtgcttgacaatatttttataaataataacacattactcatgcaaaccagaaatggtttttttttcttggagcaaatcttgggtggcctatcttggttttgtcagaattttctttagattggaaggtttgctgggcttacagtttcagatttttaaaaaacacttgtttcactttgtatagctctgcagtaagatataccaatttttataaaaatctgaagatttttctgggagataggggcagatactttccaattcctcttttgttttctgaattataatggactctgtctcactagtagaaaagggccatcagattctggaggattttggggaagataatggcaataggaccagggccccagccctgttctgggccaggatggggagtaagtgacagaaattgttgaccacttggaggattgggaccaccttgcctgggagaagctttttatcccaaagcagtggccagagcagggacccgctcatcagcacaggcacagaggtgtatcaccccttaggagtctggatccacatgcttgtgaagggtctggattagtgtatcaaagaactattgactccaagtctcctggtccatctagcaggcaagccactgaagtaggggcttgcctgctctccaagaatcacagaacaaggggtctgtgactgccactagaatggggacttccctatcctctacgttttttttttaacctgatccatgaatgataaccatgatatagtggatggcatggagtttactattcatcagacactcttaaaagagtttaacatgtattaattatattacttctcaaaaaatgctgtgagaaaatattattacttccatttaacattttcttcaaaatgaaacacagagaaatactgtagcttggatatttgtccctacccaaatctgatgttgaaatgtaatctctagtgttagagatggggcctggtgggtggtgttttcatcctgggggcagatccctcatgaatggcttaggccatccccttgataacacgtgagctctcgctcttgagttcacaggatatctggttgtgtaaaagtgtgtggcacctccaacccaatctcctttactcctagtctggccgtgtgatatgcttgttcccgctttgccttctgccataattgtaagcttcctgaggtctctctagaagctgagcagatgccaacgccgtgcttcttatacaacctgcataactgtgagccaatgaaaccccttttctttttaaattacccagtcccagatatttatttattgcagtgcaagaacagccattatataacacaggtacatttaaatgtccaacctgataattggttaagtcggcctcataagcttatattcttagcttctaggtcattccttgtttctattggaagccagaagacattctgttacagtcagggctttagagtaggagtggaccagattggattattctgtattccttccacttttagccttactattagtcaacatagggattgtggaccttcgtcctaggcagtgtaagtcttggaaagaacagatagggcctcctgcttctatttgtgaggtcttgagcatcacaatctggggcctgacaagggcatgttctttgctcagttgtaaagagggatgccttgggttgaaataaacatgcgtcacatgtatttatgtacgtgattattcacaatctaagttaaaagtgacacacagatcactttctttcattaccaagtataataaaactacccttagagaagccaattttgtctgaaaatacaaatctaaaagttggctacaatctacctgtctgctgataacttgtagactgtacactttgatgctttcagaaacatcttcagtcatcttgagcaaacatctgttcttgtcatctcctttgcaattcattttcacagcatgaacctcatctgagagatcccacagactgtaaaacctgacacaaagtactatttgtttccagctatatataagaatgtgcatccattcaagtaactttggatgtcttgtttatttcattttcttctcttccccaagccagtgatttttcacttctttttaaagtactgcttaaaatcagttttgaagataacaggagatgtattaaaacagtcaaagccccccaatttttttttttttttgcaaatagtttattatacatatgtacatgttttcagctgtcccttttcaggcacatattttaaaatgtgctttacataaaagtgttcttaagttacacactttccacaaccataaagaagataaatggatcactatgaagcattcctgagatacccatacatatttgttaggttaaccagttgtaataagcaatgccagactctcagtggattgacatgaaaaaggctgattgctttataattatcacagtccagtgcaggtaagtgaggctgagagggacttttcctccaggcaatcattcagggaactaaggttcctttcacacagtgacttggccatcctctagggcctcgagttttcctgctgtatatttgcacctcactagtcaattgagggaagataataagcatgggagactcagcaggaagcctttcagagccagatttggaattgtcatgcaacacttcttgcattttattggcagaactcaggcctrcgcttaactacaggggatgctgggaaatacagctgcctgctcaggaggaaaagaggtacagtttggtgaacaattagctaatcttccatatctcattgaagagaactcacagtagtagctgagtcggcttccttcctctaagccttgagaggaggactyaagtgaatcacgatatctccaagcagagaaaacataaaaacataatcacttaatcacctcacacagacacctgtttaaaaatgtatgccctctatgtaaatgttgttaggttttgaagggaaactaacaaatgtaaactcctggaggccaggagtgcatcatatgcataggtgctgcctttactaaaattaacagtttctgattttttccttcttgttatttctgatcacttgtgttttttaccttgacctaaaattcttcaacattcttacttttcacccactgcccagagtggccgaacttaagtagatgttaggagacatagagtttgcttagatgattcacacaaagatgtagctaattgtaaaattctcttggagtttcaaagttctctacagatcattgttttcagtataactacactttcatttgcccacacctatgagtgcaaagcttcccaaagtattgctgttaacaagaacactgattcccttgatatctttggcagtgggtgtcctgttgcctaaagtgaaacttttttttttttggttcgcctctgagcattaataattacaaattsttgagccattgttctgattctgtcatgttctgaattctagcatccatgggggtctttaattcttggcttattcattctttattccagatcagtttgcgggcctctatttcctccacccaggcctgttccgttggccgcaggtctacatctgtagtaacttctcaaatgaagccaacagctaacagcaaatggggattcttaattgacataatttctaaatataggtgaaataaagaaatgtaagaggtctcatgaaggaggcataattgtgaagaagatatttcttatacctcttcacatcatgttttttaatgccacccgcagttagatctgctttcatctagatgaagaggcagagaaaggggcgttattacagcccttcaatttctacctcttcctgaggaaataaggtgatctgttctttattaataaagggaaaagcaccctccaaagaaaacctgcaaatgcacagccttgtctgatttgatttatatatataatttatatatatgtaaattatatatataaattatatawaatatatgtaaattatatatttacatatawtatatattatctataacatatatwwtatatataacatattatatatataattatatatatatttttttcacaggctctcaggattaggcatgattctgcctatcacaagcactgtgccaaatattgggtgatagcccctctccttaaagwttatgaagttcattcaagagaacaagttataatgtgacagtgctgtgatagaaatgacccacaattattattgtgatacgtaagaagactgctcaaaacagaagatgagaagggagaacatgttatcatggatgcattcttgcttgtgcttggtttctttagtgagaaaagggtagcattagctgctcaaaatataagcagtagcagagagttggaaaattatcttcaaggctataggaaacaagaaagactttttaagctacacagtgacataaatagtttgttttttagaaagatcatcttcatagtcccatgaagggctgattggagagagatgatcctgaggcagaaagatctaaaaggctatgacattcatctagtggatgatgatgagagctgtggtactagatgcagaacctgaggctgattcaagaagtatgtaggagatagattgtatgacacttggtgatacttggctagatgaaagggataacaaaatagaatctaggctaactcactttcctttaggtgatggaagtgttgctaattaaaataaatataagaggaagggcactctgtagagagaaaatacacttagttttaaacatgttgggttgagttcctcatgcagggttctggagaggtccagttggaaataagattaaaaatttttatgacgcccaggaggaaagttaaagaatagagtgtccgtgcagatttgatggaacagtatcttctagttattcatgatacccagtcatagttcataattttattagaaacatgcatataaattagtcacctcctgatgtccctctgcttaagtgttcattggtacaactttgtctttcaaatcctgggattaggaggtcttgtcctagcctaatcttcaaaaaagcaaacaacaacaaaaaaatcagaacagctagagggtctacaaaatgaggtgaggattaggcctattaaaagaggcaccatcaggagtgttgttccttgcaaagttggagaatggggtagagagacttagaggaagttttcgacagtacagtttaatacaggtagagggaagtcatcttcacagacagagcttgattttcaattaacatttgttaaatgaaagcgaatcaacaatcagaggagtgcaggagaggtcaagtctaagtagaaggaggtaaagaaagaatgaaaggaagaaagtattaggtaaattgaatgttctgtgaaaataaattgatcactttgatttttttgatgaacctgggaaaatatctttgaagtagatttcaaagaaatttcacaataagtgttgtgggcaatggcaacaacaccaagaaagagtttaatcttctgaaaggtcatggaagcatgcatttctttagatgcatgtattattatagtacagttggtaaaagaaatgtttcatttctttataacctcattatattcattctttaaaaagctcaaaggggaaagcagtgctttagtgatggctgcacttcagtattgtaagacaaagtatggtgtttgggtctgaattgaaaagatttttgattgtgtagattcaggattagacccaaaattgtgtgcctttgggtttgatcaccattcaagccaagccctgaggcttttgacattgtgaagaaatagtgacagatcaaaggataaaaagaaaaatcactgcagataacattctgttcacacattttaaagacaggtatatcctatataccattggggtgtagggtcaagctgttagtgctgatgagatgtcagctcaagasagcagaaaacattttatgttgtgatgacagtagaatggccaacacactgatctttaatctctgtgtttgctagagggaaaaagtgaaggaaggcagcaaaataaacacaaagcagtttcctcaaaagccatctgaaagctctgagtctccccatactcttcttagagatgccaatgaaaattctacctctgtctagtgaaagtttacttttttctcattttcctgttttgtaaaagtaagacaaaaattacaaagaaatacctttggtcgaggaagtattaatatataaaattcagttggtataagagatccacatgtatttttgtctatttataaacactaaaagttttatattttattagtatattagaattatgaatcttggaattgtaaagacagtgtgtatggggtctcagaaataatctacttatcctttctgtgtcatccttttcaaatgaatatactgcaacatttttggttaaaagttaaattttgctttcattatattcacatatgaaacccttgtcaggaaggttttctgtcagaagaatgatgactgctctaataaccacytattcatttaagaggcaacttgtggtcaggcacagttgctcacacctgtaatcccagctgaggcaggaggatcgcttgagcctgggactttgagaacagcctgggccacatagaccctgtctytacaaaaaaaaatttaaaaaattatccaggtttggtggcacatgcctgtagtcccagctactcagaaggccgaagaaggaggattacttgagcccaggaagttgaggctgcaatgattatgccactgtactccggtctgggtgacagagccagatcccatctcaaaaaaaaaaaaaaaattgtgagaataacatgagttaaatatacataataaaggaagaacaggaagagagagacaagaaaggaaggtaagaagcagaaggagaggagggagtgacaagtaagaaagggtatgtttatagtatattgatataacagctactcttactagagacattataaattagagacactgataaaattatcactattactttaaaaaacataacattggaattagaagaagtaagggaaaagaaaaaatatagaacttgctatagaaatcagtaaataccttgtatttcttttttttttttttcaagactaaagactatcttttaaactaacagctgctgctttaaagaaaaaaaaaaaaatccacccactcttcaagtctctgtctatttgtgatttcccagctccctggaggcctggtgaattgtgtggcatttttgcacagaaagattaccctgctaaaaactagtggatcacagcctgggcaaacttcagctatcacagctatcacagggctgtccaataatacacctctgtaaggtgtcgtggtggttccttggcccttcattgttatttttcacacatgttgactctcacagacttacaacagcatactttcatgtatgacatgactgacaccttgacaaaatcatttacaacctagttcatgactccttttagtacaatacctgaaccagacctacccagttactggaatatgattgcagcagaattcctataggtttaaaaacatgctgatgaatactttattgagtaaacattttattttgaccacttaatgtagtttagaaagtgaaatctatgtttgtgttaataacaactactttcaaaatatccttttatatcactcagtaagttaaaacgattaatgcatactgtgataatttattdtgtgccaaaaattatgcaaaatacttttatcccatcaatattatctcatttattaatttatattttatgataactttgcaaagtgtctattattataatacacacttaggtaaaaaaagatctggagttcacagagctttaataatttttctaaaccctcccaccttttcagtagctaatctaagaattgaactcacatgtgtttgactccaaaacccaggtaattccattgtcccacaatatgcagtattgattttacattaaattatttccaaagtatataaaagtaactatatgaaagataatggtacagaccctaatatttttccttaaagaagtagatagtaaggttatttagctggaaagtatggcagattatgaaaatgatttggagctaccctcatgagaaatgtatttgagtatctctaaggagttcataatcatggtgagagcccaagtgaaagtggctgacacgaacatataatagtgcagtaactggaacctcgtggcactcaggccgttctggacatggaagagatagaaagcatgaacaatggagctgatccctgcagtgaataattctagagggctggagatgcaagtcaaatggaaagtctgaagttcacatgtggttacatctacctttgactctcagttggctatgatgccctgcaaagtagctagtggaggcatcaccctgaaaagtcctggcctccaccacacagcagcaaaacaactcactagcacagggagacaaaagctcatcactacaaattcttgcaaataactcaccccaggatatgaaatttcagaatcaaaatccaaaaaatctgtgaatcaactatacccccaccstagagcttgagcctaaaatagtcaggtataaacactcttggtcactgaagtacgcatttttttaacctcctaatatggaacaagcttagccttccctctggaaaactgagtaaatagagaaaaaaacactgaagttattattattattattatttttgagacagagtctcactctgtcacactgagtgcagtggcgtgatctcggctcactgcaagctcccactcctggattcacgccattctcctgcctcagcctcccgagtagctggggctacaggcgcstgccaccacgcccygctaattttttgtattttttttttagtagagacggggtttcaccgtgttggccagggtggtctcgatctcctgaccttgtgatccgccggccttggcctcccaaagtgctgagattacaggtgtgagccaccacgcccggccaacaccgaagttattaaagacatcaccattcaaactaaggaacctatctaactatgtacttatgaaagagttactccyagaaataagcaaagagtttagatgatgttaaatttatgttcttagcacggtttctaagtaaatgattttttgtccataaaattattccgatattaaccaaaataattggtaatttaagtcctgttataattttgagtaaataaattattgcctcctaaatttktatgtttttacaagtatgtaaattggtaatatgtaatataaagggaatgtattttaaaatgttagattccacaattatttgaagtagaaatgcaggttacactacaaagtctacttatttgaaatagtatgtagagaaagcrtggttattggcctgtattacttttcctaattgtctctttttggggaagctttgtccatagttgtatgtcccaaagtccatagttgtatgtcccaaacatgtttgagctgccctcctggtgtgaaggagggtgaaggatggctgtgtctggtgagcccgcttactcccagcactcgtgtccctggatggctcacatgcatgctacatgaaatctccacaactcttatttcaccctccaccccacaagcctcgaccttcctgtcagtcacaccagtgctttccatctccacccttctagaattatttgcctcagggatcagctccattgtccatactttctctctcttccctatccagagttgcctgagggccatagatttcagtgactataccataatacatttgtgccagccactttcattcaggtgctcaccacaatcatgaccctctaatagatgcccaaatctcacaaagatggtcccaagtcattttcataatctgctgcatctctcaggcaaatgatcttactccctatttcttcagggaaaagttttaggctctttaccatcatctttcatgtagttccttttctccacctcaaaagattttaaggaactcttatcttttttctgctcctcttgacatgtttattattmctccctactggtggaagaagagcatgctggcctcttagagaataacccctccactcatgttcatgattcttcctcttctccctcatgctttcctctcaatcactcccatttcttcattttctctctcctcaccgataatttattttctacctacaaacattgtaaaaaatcatacatgagagtagagagatccttagaaacatcctcagggagaatgaaagtccttggctcttgaagtttctgggcacaggcacacatagaatacacaacagagtagaagttttggacaaaagagagcatgcatcaggatgatggaggtgaaaaccaacatttcataggggaatttagggaaggaatcctgagtgatgcatcatgaagtcatacgttctagcagcacccaccctcagcacccaaggagaatgacataggcagatgccacggggagcaaagggtgttatagaaaaacagtaactattacaagcctaactgatccctttctgaatttcaacacttttttttttttctgtagagaaataacttagctgtcaaatatacttctctggctaactgcttcacaactccagatagttacagaaattgttgctgccaacatgagtctyaaattaggccaattagactacaattcaggagtctaagaccctgactatatgtaaggaaaaaaaaaaactgttttgaaaaagaagccagatgagcattttagagagagaaaaaaaagtgtttattcaatgtttattcagttttcctgcctaaatttaaatgcttcttaattcaattaaattgtgtcaaactgagtaktattaagcacttactatatgtctgtctgctctagaggatgcaaatatatttatgcctaggtgatataaaatctattttaggtgaaaggacttatgcatgtgaaaaaaaattagagaacagagttcaattataagcaactgtgaaaatacrtgctcagttaataacctatcatggtggtcagaaaaaataaaatcagttttggttggaattatccataaaggaaatgggacagaaaagccattggcagtgatagaaagggtatttgaaaagataggagtaaggttacctcagcctacaaaagcaaaattttagctatagaaacatggcctagctatatttgaatattggtgttggagagatagagatgggtgcaaacaaatacagtagatccttaaacaacatggatttgagctgcatggatccatttatccacgaatttttttcaataaatgtattggaaatttttttggagatttgtgacaatttgagataattcacagataaattatgtagcttagaagtagcaaaaaatcagaaaggtaggtataccacaaatgtaaaaaatgtagattctagcctattttattatttactgccataaaatatacatgaatctattataaaagttaaagttcatcaaaacttacacactttcagaccatacatggtgccgtttacagttgagagaaatgtaaacaaacttaagggtgcagcattaaatcataactgcatgaaatgaacagtaatacatatgtactactgtaataattttgtaaccacctgctgctgctattgtggtgagctcaagtgttgtgagtatctgcttaaaatgccttgtgatgctaatcatctccacatgagcaatttcatctctccagtaaattgtgtatagcaataaaaagtgatgtgtcaacgttcttgcatttttcattgcatttagtgcaatactgtaaaccttgaaagcaccatgggacccatacaaagtgccagtagtaatgcttgaagtgctcccaagaaacagagaaaagtcacgacattacaggaaaaagttggcttgcttgatatgtaccatagattgagatctgcagccgtggttgcctaccatttcagatagaagwttcaccttgacaacagatgacatacacttatgatatcgataaatacaatacagttctatgaatgaattttctcttccttatgattttcttaataccattttttctctagcttactttattgtaagaatagagtgtgtttatatatatatatacacatatatatcatataaaatatgtgttaatcgattgtatatgttaccagtaaggcttctggtcaacagcaggctataagtagttaactttttggggagccaaaagttatatgcagatttctgcattgtttgagtgtcaactgtatatatgaaaaaggggatgatcttttccgtgaagccactgcctatattgcatttcatctgggctcccattacacttctaggaaacctttctttgataaattttacagtagaatctcatrgttaaaagcacaggatttgaagccagactgtctggttcaaattctggttacaccacttagtgaatgacattaagcaaattattcagcttttctgtaacttaggttttttccatgtgtaaaatggagataataagagaacctccttgataggactattgtggaaattaaatgacttaaatgtgtaaagtgccaagcacaacatctggcacaaagtaagcactttgtaggtagatactatttattattattattattattattattattattattattattattatttgagatggagtcttgctctgtcacccagacgggagtagagtggcacgatctaggctcaccacaacctctgcctcctggcttcaagcaatccccctgcctcagcctcccaagtagctggaactacaggcatacatcaccacacccagctaatttttgtatttttttttttagtaaagatgaggtttcacaatgttggccaggctgtacttggactccttacctcaagtgatccgcccgcctcgacctcccaaagtgctgggattacaggtgtgagccaccgtgcccagccaatactatcattattgaattaccttctgcttgtttctgagcttcatgaaagaggctatgcatttatttatttaatttaaaaatgtttaattaagaaagattgaatatattcaaggtgtacaatgtgtacaatgtgatgattagatatacatatacagtgtgtagtggttaccacaattaaactaacacatccatccccacccatgctgtaccctagatcatcaaacatattcattataactgaaagtttatatcctttgactaacacctactcattttccccacccactagcctttgaagaatgccactgtattatctgcttctatgagctcagcatttttagatttcacatacaggcataccttttttttttttttttttactttaagttcttggatacatgtgcagaatgtgcatgtttgttacataagtatacatgtgccatggtggtttgctgcacccatcaacccaatcagctaggttttaaaccctgcatgcattaggtgtttgtcctaatgctctccctccccttgttccctacctgccaacaggcctggtgtgtaatgttcccctccctgtgtccatgtgttctcactgctcaactcccacttatgagtgagaacatgyggtatttggttttctgttcttgtgttagtttgctgagaatgatggtacccagcttcatccctgtccctgcagaggatatgaaytcattcttttttatgactgcatagtattccatggtgtgtacgtgccacattttctttatgtagtctatcattgatgggcatttgatttggttccaagtctttgttattgtgaatagtactgtaataaacattcacgtgcatgtgtctttatagcaraatgatttataatcctttgggtatatactcagtaatgggattactgggtcaaatggtatttctggttctagatccttgaggaaccaccacactgccttccacaatagttgaattaatttacactcccaccaaaacagtgtaaaagtgttcctatttttccacatcctcaccagcgtctgttttcctgactttttaatgatcaccattctaactggcgtgagatggtgtctcgttgtggttttgatttgcatttctctatcaacaagtgatgatgagcttttttttcccacatgtttcttagccgcataaatgtcttcttttgagaagtgtctattcatatcctttgcccactttttgatggggtttttttcttgtaaatttgtttaaattccttgtagattctggatattagacctttgtcagatggatagattgcaaaatttttctcccattctgtaggttgcctgttcactctgatgatagtttcctttgctgagcagaagctctttagtttaattagatcccatttgtcagttttggcttttgttgcagttgcttttggtgtaccatgttttattgygcctcacaggtactgtgtttcttacaaattgcatttttgtgagaactctatttcaagtcggtgggtgctgtttttccaacatcatgtgtttactttgtatctctgtttaacattttggtaattctcacaatatttcaaaagtttttattattacatctcttatggtgacctgtgatcagtgatctttgatattattattataattgttttggagcattataaacctcatctatataagatgggaaacttaataaattttgtgtgtgttctgacttctccaccaacctgctattctcccatctctctttctctctttgggcctccgtattctgtaagccatcacaatattgaaataaggttaattaataaccctacaatgacttctaagtgttcaattgaaaggaagaatcactttaagtcaaaagcttagtaaggaagccatgttgaaagctgagacagggcgaaagctaagcctcttgtgccagctagccaacttgtgaaagcaaaggaaaagttcttaaagaaaattaaaagtgctactccagtgaacacacaaatgatgagaaagtgaaacagtcttattgcttataaagttttgattcrtctgtatagaagatcaaaccagtcacaacattcctttataccaaagcctaatccagagcraagccctgctctcttcaattctatgaaggctgatagtggagaggaagctgcagaggttggttcatgaggtttaagaaaaaaggccatctccataacataaaagtgcaaggtgagcagcaaatgctgatatagaagcttcagcaagttatcccaaagatctaactaagatcattgatgaaggtggccatgctaaataacagattttcagtgtaggtcaatcagccttctcttggaagaggatgtcatctagaaattcatagccagaaagaagtcaatgcctggcctcaaagcttcaaaagacagtctgactctcttgttaggggctaatgcagctagtgactttaaattgaagccaatgctcattgactattctgaaaaccctagggctcttaagaattatgctaaatctagtctgtcagtgcaaacaatgcctagttgatatcatatttgtttatagcatgatttactgaatattttcagcccagtgttgagacctactgctcagaaaagaagatagttttcaaaacattaatgctcattgaaaatatacctggtcacccaaaagatctgatgaagatatacaaggastttaatgttgttttcttgactgctaacataacatctgttcttcagcccatggatcaagcagtattttgactttcaagtcttactatttaagaaatatattttattttactttatgtttttgagacagtctcactgtgatatccaggctggagtgcagtggcacaatctgggctcaccacaacctccacctcctgggttcaagcgattctcatgcctcagcctcctgagtagctgggattgcaggtatgcaccaccatgcccaggtaatttttttctatttttagtagagacagggtttcactgtgttggccaggcctgtctcaaactcctggcctcaagtgatccacctgccttggcctcccaaaatactgggattacaggcatgagccatgtacccagccaagaaatgtattttataaggctatagctgccatagattgtgattcttcttatggatccaggcaaaggaaattgaacaccttctgaaaaaaattcaccattctagatgccattaagaacattcacgattaatggaaggagcccaaaatataaacattaacagaagtttggcagaaattgattccaaccctcatggatgaatttaaagggttcaagacttcagtggaggaagtaactgtaaatgtggtaaaaatagcaagagatctagaattagaaagtagagcctgaggatgtgactgaattgctgtaattccataatcaaatttgaatggaggaagagtaccttcttatggatgatcaaagaaagtggtttcttgagatagaatctacttctgttgaaggtgctgtgaacattattgaaatgacaacaaaggatttagaatattatataaacttagttaataaggcagcagcagggcttgaaaggattgactccaattttgaaagaagttctattctgggcaaaatgctattaaacagcataacatgttacagagaaatctttcataaaaggatatgtcaatcaatgccgtactttattgttgtctcgtttatgaaattgccacacaattccaaccttcagcaaccgccactctgatcagtcagcagccatcaacattgaggcaagaccctccactagccaaaagattatgatttgctgaagcctcagatgataattagcattttaagcaataaaatatttttaaaataaattatgcactttcttagacataatgctgctatacacttagtagactattatagagtataaaactaacttttatgtgggaaaccagaatatttgtgtgactcactgtattgtgatattcagtgtattgtggtgatttggaactggacctgcaatgtttacaaggtatgcctgtgtaagtgagaacataatggtatttgtctttctgtgcctgacttattttacatagcattatgtcccctgagttcatccgcgttgttgcaagtgaygagttttctttttttaatgtttgaataatattccattgtatatatgtacctcaatttctttacttattcttctgtccatggacacttaggttgttttcatagcttccctattgtaaataatgctacaatggaaaaggaggaatagatatctccccaaaatatttattttattttttagatatatacccaaagtgggattgctggttcatatggtagctctgttttaaatttttaaaggaacctctgtactgttttcagtaatagctgttctagtacattcccaccaacagtgtacaaggattcattttctccacaccctttgcaacacttatgtcttctattatttctcctcctcctccctcctccttcttcttcttcctcttcctctttttcgtcctcttcttcctcttcttcctcctcctcctcctcctcttctttttcttctttttcttttttcttaaacagagatgagatcttgctatattgcctaggctggtctgaaactcctgggctgacacaatcctcccacttcagccttctgcatagctgggattacaggcatgagctactcacctagcttcttgtctttttcatagcagctatcttaataggtgtgaggtgatatttcattgcagttttaatttgcatttctctaatgattattaatgttgagcatcttttcatgtacctgttagacatttgtctattttctttggaaatacgtctattcagagcctttccttgttttttcaaaactttttatttgacaaaaaattktatatatttattttgtataacatattgtttgtaatacacatacatcatggaatggttaaattgagctaattaacatatgcattacttcacatattttgcagtgagaacacaaattctactttttatggagttttcaagggtagaatacattttattaactatatcaccatgttttacaataaacatcttaaaatttaatcttcctrtctaaaattttgaatcccctcaccaacatctccccaactgctccccacatccttcgtttcccaagtattccagcccctggtgtaaccaccattgtactctctacctccatgagttcaactcttgtagattccacatataactgagtttatgaggtattttttttgtgcctgccttatttcacttaatgtcctccatgttcatccatgttattgcaaatgacagaatttccttagaatagtactctactgtatgtactattcagcctccatatatatatatggagctctctctatgtgatatataatctatatatgatattttatatatatagaatcatatatatagatatatacatatcacattttcttcatccatttcatccattgacagacacttaggctgattccatatcttcactattgtgaataatgctgcaatgaacatgacagtgcagatatctatttaataaactgatttcattcctttggaaatacacctagtagtgatttgttggatcatatggtagttctatttttaattttttgagaaacctccctactgttttctgtaatggttacactaatttacattcccacgaactatgtacaaaagtttcatttttccacatttctgacagcatttatctttcatttttgataatagatattctaaaaggtgtgtagtgatacctcattatgattttaatttgtatttctctgaggattagtgatgttgaacattttttcatatacctattgaacatctgtatatcttcttttggaaatgcctattcaggtcttttgtccattttttaattggattcttcattttcttactatttagttgtatgaatttctcatataatttgaatattagatatgtggtttgcagatgttttctctcattacatgttgccttttcattttgttgactctttcctttgctgtgtagaagctttttagtttgatacagtcccacttggtattgtttgctcttcttgcctgtgctcttggtgttctagccaaaaaaccattgtcaagaccaatgtcaaggagattttctccatgtttttttsctaggcttttaatggtttcaagtcttacatttagatcttcaatccattttgagttgatttttgtgtatggtgtaagataaagggcaaatgtctttctcatgtagatagtgtttcaaatgtaatttataaaagagactttctttccttattgttgagtatcagttgaccatatatgaatgggtttatttctgggttctctatttagttccatcagggggctgtacctttaatgcgttgaaactctagagcctagcgtagacctagagtataggagaagtaaacaaatctgatgaagaaaagaaagtctagttaaatgaagcattgtctaatactatacacccccttccccacatacataccttaaggcaagatacaatttgcttaatgaacactctcatgccattatagtagtcatcttgtttccagctggcttacaacttggactcctctctgaaattctgaaagtcagtgtagaaactttagccttatttaaaaaaaaatacttgtacacaataatagctatagtctttttgtggaggtgaaagttaatctacctttgtttctctggtgagccatggtaggttcctgagccaggggagcattgtaataataacagtgttttaggatttcttttttcattagacatttaaaaaaaaatagagatagggttttgccatgttgcccaggctagtcttgaattcctggactcaagcgatctgcccacctttccctctcaaattgctaggattacaggcatgagctgcgatacccagccaggaatatttatgtagtaaatatgtagaaagtagattgtcttgaagagagagcagctataaggtggccaggtaggcatgaggtaaaaaggactaggaccccagtgagcattttgtctacctttgyggtagacatggcagataccaggtatatattaaaactattgaataaggaggaccattgraaataacatgtgaagaattcacataatgctttttgaaaccagacttacagtatcttatattatctgtggctgtaactactcatgttcactttttcctttagcatgaattattagtaaaggcaaaacattctgcattctgagagttgacctaatgtggtgatcattttatgtgttaacttgactggaccacaaagtgcccaggttaaacatcattctcagcatttctatgagggtgttttaggttgagatttacctttaaattggtagactgagtaaggcagactactcttcctaatgttatgggcctcattcatacggttgacagcctgaatargacaaaatggctgaccttctccaaggaaagatttccccccaccttactgacttcaaactgggacattggcttttctctgccttctgatttgaactgaaaaataagctcttcctgagactcaaacttactgacctttggacaggaactagaccattagcactcmtgggtctccagctggccaactcaccctgtagaccttgggatttgtcagtcaccataataatgtgagccattctttatatcaaattgtatttattataaggaattggcttattggttctgtttctctggagacccctgattaaaacacctatactatagatttttaaaatctactaggcaatttctctcaggtttacatggatattgaaacaaagagaaaaattcagatgttacttgcaagcatcttcctactaaataaattttccatgacattaaaattaatatcaaccatggcaattatgtgttctttcctctcttaaagtaatggtacttttatctaaaattcatttcatagtgatatatttaatgattacttgggtcttctttacttacattaattaggctttaacaaaccagacagcccataacataataaatagcttgaaattaatatagtgaaaactcattaaaaaaactcttggtttcttaatttactgctgctcctgaataaatatgctcagatatttttattttcttttagtgtgaatcatttcaacttaaagattagatgtttaaatattttgaggctctccaatgttttccaacagtgaaaaatcttaacagttttacatctcttaatgactatgagttcaaataacacattcatgataacctgttagtttaatatacatacatgttaacctatgtatattaacctaactttttaactgattacatattagtttcatatacgtccatacatatatatttgtttaggcctgtgcacaaatatatgtacacacacgtacacagataggcttgtccacacatagatctatgtatattctctctgtaattatttcagacaaacaaatatatttaagtggagataaaatgtttgtttagtgacttacatagctacttttcaatgtatggcaatcataacatcaacctcagccacaatggtattgatgattatgattrtaatgataaaacttgcatatgtaatgggcttagcaagtttgtgcagcaaggagattggcawgatggcccatggtatcctgcaatgctaggattatatttataagaatagcaagtcagctttccagatagtaattatagcaaagtaagcagacttcaacttatagtctcagggctactgattattggggaacctgcccccgatagtcatgtaggttcttttctattttccctaagcatcggccggattgagaaataaagggacagagtacaaaagagagaaattttaaagctgggcgtccaggggagacatcacatgtcagtaggttccgtgatgcccctcaagctgcaaaaccagcaagtttttattagggattttcaaaaggggagggagcgtacaaatagggtgtgggtcacagagatcacgtacttcacaaggtaatagactatcacaaggcaaatggaggcagggcgagatcacaggaccacaggacaggacggggtgaaattaaaattgctaatgaagtttcgggcaccattgtcattgataacatcttatcaggagacagggtttgagagcaaccagtctgttaaaaatttattgggcgggaatttcctcttcctaataagcctgggagtgctatgggagactggggcttatttcatccctacagctcgaccatagaagacagccagacccaagggtccatttcagagacctatcctcaggggcgcattctctttctcagggatgttccttgctgagaaaaagaattcagtgatatttctcccatttgcttttgaaagaagagaaatagggctctgttccgcccggctcacyggtggtcagagtttaaggttatctcttttrttcyctgaacattgctgttatcctgttcttttatygaggtgcccagatttcatattgttcaaacacacatgctctacaatttgtgcagttaacacaatcatcacagggtactgaggtgacatacatcctcctcaatttatgaaaatgatgggattaagagattaaagtaaagacaggcataggaaatcacaaggatattgattggggaagtgataagtgtccatgaaatcttcacaatttatgtttagagattgcagtaaagacaggcataagaaattataaaagtattaatttggggaactaataaatgtccatgaaatcttcacaattcacattcttctgccatggcttcaaccagtccctccattcggggtccctgacttcccccaacaactgatcagagttgaaagaatataggaaacatataataagagggttgtagaygtcctgacagtctgacttaatcatttgctggtagtataggtagacagaagtcgtccagttcttcctgggcctgaggaagtgttcgtgaatttgcaggtaaggacagggtctgtggttgtagggttaatagagggaatgtctgataggctttggtaacagccaacataagaaagaggtgctttggtggccaggtgtggtggcttaagcctataatctcagcacgctggggggccaaggcyggaggattgcttgagcccaagagtttgagaccagactgggcaacatagcaagactctgtctcaagaaaaaaattttaaaaattagccaggtatggcagagcacacctgtagtcctagacacttgaaagattgaggcaagagggtcgctcaaggccaggagtttgaggctgcagtgagctgtgatcataccastgcacttcagcctgagtgataaagacgagacctcgtataaaaaacgaaaaaggtgcttggatgcactgtgctctgaggttttgtttctgactcttatgttaaaacgtcttgaccctaggacctggtttagatgaggatttccatggaaaactgactgttcctttgcagattcttatttataaaactctccttgtcaaagtcttttgtctggtttgcatctcaactttgacttgtgcaaccaaagatacmcaaaaacaaaacgaaaacaaactcttgatgcttcaaacatatgtttattctatcctattygtctctgttttaatgaattacagcacatctaccttctgatctagctgaaagccaagaatttaattcctccttttcctcacccctgctagtactactgacatagtcctatactaatcttcctgctttaattccttttctgcaaggcatctagtctaatattcttaaaactagatcatgccygattgaaactcctcaatgaattcccaatatactaggaaaaatctgaacttgtctctcactgacatggccctaatcagactcccacagtgtctcattttccgcattcccacctcttcattcctccagcaacagtgactttattcttgtggcttgaacgtgccaagtcttttcccagccttgaccctgtacgcttgctattttctcggtctggaattctcttccccttatttgccacatgactccttttcattctttaggtctttatcacttagcattctgtgacagataacagaaaccactccattttaatcagaagggaacttaacatggtaagttagtgcttacaattttttagaaggtcttgggaatagctcttgatgtggaactattccagactccaagaacaccaccacagaactggccctctacatctgcctcatcaggaagctggggagttagaagactgctgtcccaactgctggcttcagggttgtactactataaccatgagtaggggatcaggaagtggggtcagaaccattaccttcaggaacacatcttatgtgctgtctgacaataaggagactggacttctgtgccagtgaagtagacaccttctctgccactgcgtcgtccttctacagtttagttctgaatcagtgcttcgcatgagtatatctggttgtctgtgtctaaatccagatccctagctgcggaggaggatatgaaacatagcttttagctttccagtttctggagtacaagaaggtatgcaaaatgaggttgaaacagatgatggtctgccagaaggcctcccctcattacacctgtccatcccatgaaatcctattatatcatcctctttattcccataatagcagttattgtaatctctatcctttttaatttgtttttcatttgtatactgtgtgagtcttccactgctggactgtaagctccacaaggcaaggggctttcctcacttatgcaggacttggcatgtgcgaatgctagcacaaatgtgttgctgaattgagttgaataaatgaataaatagagcctgcttattatttctatattcactaaacgacactcattggtctctgacaagattcccttttagttggggtgaccaaataacttgttgttcaaatagggacacttcggagaaagaaatgggtagcatgattaataattatactaagacagaaggcatgacatggggctgtctaaagcaaaccaggcatatagtcattaactcattataatcactattctctgacagacttatcttcttaggttgccgaagagggatccagatgtctctaccctggccaactctttttactccttcattttccagtagttgggtaagaattttggttgcatggactataacaatagttttatacttcttgtaggatttctaaaactaaaaaaaaattctcacaatattttactatctagactatttgaacttgattctagatcttgtaacaaaaatcaaaagcagggttctagtgtatggttttccaatgtcattttaagtaggttactcagcaatcactgggagagtttactagaaacagatttttaaaaacatctctcttggagctactgatttctttagaggagctcaagaatccattccttgtaaaactaccagtgagtatggcgcatggttagatttaagaaccatgagataagaagcgtctgagccctcttctatatttggtacaaggattaataagtacttttaacatatataatcattggcattaactacgataaaagctgtaaatgactcagcagtgggaactgacaggctactgtgctccagcgtgcaggatgtctgtgtgatgtgatgcatgtgtttgcaatacaaggcagcccacccccaaccttccgggcctgcagctgagatcaactgtgactaacctgattccaaaactagctgactcatttcattgcttcctgtttctcttattatactttgaagtgttttcagtgaagagcctagcactctgcccagtgtactgtaagtgcttggtaattattggttatatatatatacacacatatatatatacatttattaaaagaaggaaggaagaaaagaaggaatggaagagaaggggagagggagggaaggaaggagggatcaagtaatgaggcaatatggtaaatatagtagagaaacaaatttactgttctttatcaggatgcaattttaggaatttaggatttaggaacataaacacaaagtatcttgggaacaggacaaaattatgtcctctgttgtttcagatgacttgttaaaaactgaaattttgttgcactggtttttacacatctgagtgctaaggtaactgcttgtttgactgaatgtaacttaaaaatatatgtaatggacattttttatttctttaaatggtgtaacaggttgatgtgagaatggacctgctcagggtgaactaaattgggactggagtcccaatttatcaccctcatcaaattatgtaatttatttctttcaaaatattaaactttaaaatacagattataataacatttattttaggattatgagaatatgagaatcaagtgagctaatgaatgagaatcattgttttgagaatcaagtgagctaatgaatgagaaagttctaggaaatattttaaagtgagattaaaaaagattacttgcccttttcactgaaacaggttttcttaaaaatcaatcattaataactagaatatagaggcatgctgtattcaaatctgttgcagtcttcagccttattttcattatattgagttcttgatttcttgatatattttgcgtccaacatggtttctttcagataccagtatctgaaagagctttttaatgaaatagatttttaatattcattcattgtctagatattgtgaaattgctgttgttctataccaatcttagacataatacaacctgcagttactgatgtgaaattgaatggagaaacttcattctgtaaagttgaatcagtgattaaaataaccctatgaactatctgaacagtgtgtgtgccttggttctggttttcttctatctaattgtagtcccaatatcagttaacatcctccatctccctgtgcagtgatgcttacttactctgaacagatgttatagtgactggaaaaaaatcagtttatccatcaatagacctagatctcatatctcctaaaaatgtactttccatcattctcttttgagccagtatttattattgtcccaaaaaatgtgcattgcaactggagagatgcagccagcttaggcaagcatgcctctagtgggcttagggcatttctgggccactctgtctctttatctggaggctggaaatgattgtttgacacacaccaaagggagaacttcatcagacactgaaaatggtaccttgtagcctgcaaaaaaatacttcccattgctccaggggtggagaaaagtaaagatgcagaaacataaaagtcaaaatcaaaatgtaatagaaaaatgaaagaggaaatagaagaggaaggtgataaaaataatgtatgaactgcttttttatttagcagtcttatcaaaatcacaggggatttttttgtctgtcagagtctcaaatccttaggcatctcatgaaatatcatgaattttcaatgtgctttaaattttacatttttgaaagcaagagaattttcttacatactgcatcagtccagcagataaaaactagcacaacagaactcttataaacttatttttgtcgaattcacttcttataaaagcagtatagttacaattgagggaaataatggaaaatggctttgctgtgaattttgatggctttgttgaatctttaaatctaacctcattccgtctatcattagtcttttcctttcatgcctttgatggcaatcgtgttttacagatgaacccattaattcactgggaggttaagtgattagctctgcctggcagtcaggtgcagggttaagattagataaaagtccctcagggtctagtgattgctaaactttgaggacagtgaccctccttattataaaaccagacattcagaaattatctaacagcttctttcaccacattccaaagaaagtttatttacctttacagagaaagtgcctatgatggttttaaaagccaggttgctagaaagacactttctcctcagaagctaatataatttagagagaatttcttgagagaaatataaatgtatttcaatttatgcattgcctacataattaataataaagtaagtatttttttggcttgttaatattccaggcaccccaacaagctctattggggttacgaaggtatgcaactcttagaaccaacccacactgagtcattcattgttttgttgcttcattcattcatgacagacaattcatttatgacagttgttaaatttatgaaaaaatagcttgattaggaaaggtttcacggtctagattgtatcagatggataaaatgttaacaggcacwgaagtgtgagtcattccaggtataggaaataacatgacaatctccctcctaaataaatctctgtggtagaaagacatagtaacatttaatgagtagcacacatgcactgatatgcctagagcattttgtaatatgtggaaagtaattttaatataagttaaatatttataaaatacatatttaaaagataagcatcattttttcttcaattttgtgattcatctagttttctgtaaatggtagaaaatagaacaattctattatattccaatccttcctccacaaccctctcaataaaattataacaaagaacaagccactacataattccccttccacttactgtagaagaagaacaactcttaatattaattgtgagggtttcaccagagtattgtctaattaaagatgaccagagaagcggcagcctcagagactcctttaatttgacatcctgaatacgtagcatgtttaagagtagttctcaggggtagttccacaatctattccatttgtataaacctccagaacttcactgagacaataggagtatgtaaaggaataacttgcttccatgaagaacaaatatttactgcatttgcttgcattgtttctcaactttttagtaaatattttatttctgaaatgaaagaactgttttgtgcaaaaattccttcaagatgcagatttcagtgaacttggggttccagccattgcagccttgagtataatttccacctgaaggttgaagagatgtgagcaacacttaggcaccccttctatattttcagcaaatagtgtttttaatgcttctttgttcttcccttgttaaatcttcagattagtaactgctgattaatgccccaaagagaagggattacaggcagataagtattgcatactaatttccttaaatttggggatgggcagaaatatggaaagatgtgagtaaatgttataaacatttcaaaagaaaaaaaaatgacccacaatggggagatgtgttaatgtgttgtccaggcaataaaagtgcattactttccttcttttattgtgtatatttaaggcatacaacatgatgctttgataaatgtatattacatatatatttagtgaaatatactaaggtcaagcacattaacatatccatcatgtcacgtaattaccttcttttttattttttggtggtaacagcacctaaaatctgctgtcttagccagtttctagtatataatacaaaattattagctgtagtcctcatgctgtacattagctcttgagacttacttatttcagttgtttatgtaactgcaactttgtacccattgacgtgcatttctccattccccatcccctccttgtccctgataaccactgttgtactatctttttctatgggcttgacttttttttttttttttaattccacacataagtgagaacatacagtatttgtctttctgtgcctggcttatttcacttagcataatgtcttccaggtttgtccattttgtcacaaattgcagaattttctttttttttttaaaggctgaacagtattctcttttgtatatattatgcattttctttatccattcatcccttgagggacacttaggttgctttcatatcttggctattgtgaatagtgctgcaacgaacattggcgtgcggatatttctacaaggtgctgatttcacttccttttgggtgtataaccagaagagggattgctgggtcatatggtttcacttcctgggtggaagccccccagttttgaaggcctgtattcagtaaactgtctacaataatcccatctgagcctccttttcttcagcctctgtctgtctttgttttggcatctatcttctctgatttsttccttcccacgtcccttctccattgccagttccttttagcctcagcaaataaacatgttccagtttcttatttcatgagagaaaagtaaaaataaataaataaaaacacaacctttaaaccttctgcctctctctcagtaatagttccttaaagaaaggaggcttccatgtgttaccactgcgtcattatcctcagcaaactaacacaggaacagaaaatcaaagaccgcatgttctcacttgtaagtgggagctgaacgatgagaacagrtggatacagggaggggaacaacacacactggggcctgtcaggagtagggggcagggaaagagagagcatcaatatcaaatagctaatacatgcggggcttaatacctaggtgatgggttgataggtgcagcaaaccaccatgacagacgtttacctgtgtaacaaacctgcacatcctacttatgtatcccagacttaaaataaaatgcattttttcaaagagtttttgtttcttaaattttgcatccaattccatgcatcactcacttcacyctagtcccagccctgtgtatccacttgtgcatttcacaggtaactcaagctatttgtattctaccttcaatcaagccttctttcacactgttactccctgcttctgtgaacgtcatcacattttacctggttgtaaaagccasaaagctgggttgccttcacccttttctttatccctgtctctccaaccttataatcagtgatcatatgttgcctcttatggctctttaatatctttcttcagaaacactctctctacttaagaccctcctcatttctttcctgaatggccaagaattgtcctctaactattcttttgtgctaatgtgtcccccgccccatccttctctgttttttacgtaattgtggccagagaaatttttctaaaatgcaaatctgatcatacatccttgactacttaaagtctttcaatacctttttattggcttagcataaagtccaaaatccttagcaagccgaataaaaaccttaatcatctggacctcctaagcccttcattttacttaattgtcactgaccaattaagacctttgctgaaatacttgcagggaggtaaataggttatttctcacagcattgggccttctaatatgctttcttctgcctgagattctcttcctgtaaaactcaattcatagggcacattatccaggaattcttcttgatgtttacagtttcagctaggcagtcattccatctaytccttgtaattcagtacttccgtttcatagctgatactgtttcctggtcagcctggtctccatgctatgagctatttggaaacagggaccatatattttaatcttatgtctctagtacattatacagttcttggaagaaagtaggtatttccaaatgatagaagatatcagtatggaatattattcttttctcattttcttcataataataacagaattccctttaaaaatgttttaatatattactaatttagtattttgatggatcaagatttggctatctgcctagaaatagtttttctcgaatataggcatctcagtccctcccatctctattcctcctctgttggaaaagccacccatcaatgcaatcctagtacaaactgagatgcttaaaaatcatgatattttattccgaggatatctatgaggcaagactggggatgcagggaaagagtagtttaacaactgacaggaccacttacattctgtttctccattcttaagctcagacccccagatacatgttagaatcaaggcatgagaccattgttgttggccacattaaatgcctctggctggacttggagctgaacaagaattgcatggacatctagtccagacaaggagcctcaagagacaaacgtatctcaaggttctgactgacctagactaatataatttaatagcaaatgcatgaaagcgtcattaaatgtaactagttttgcctaagcagaacccagaggagaaatgtagatctaaaataagayttagtatatttcaacactcaagagctttcttgatcactttaaggcatgctaacaattttccatatgtataacagttataaggcaattaatggaatattttgcaaatcaattgcaaaaaagagaagaaaaaaattgagtaagtaacagctgaagtaaaaaatgaaactgctataaatatagataatagcttccattaaaagtgtcttccaacattggaaagtttaatcacagttacactcaaatcattggttacactctatttcacagttatccagcttgggaaaatctatgcactattaaacatgataggttcaatgttttttataatatctggtcagcagtggaaaattttgttagctaatttcattaacaagtttcagtttcatttaattctaacaataataattaaaaagcaagtactatgttttagatggtgcatgtctaatctgtagagggggaggaatttttctaaatgtagaggaattgagtcagaatcacatagggaaatataaatagacctaactatttatatttagttaataaatataactatatatagtttagtttgttttcttataaataaataagaaaaacatagttgggagaaatatttgcctcaaatataagagaaacgtttaatacgttgaatatttataatggtcatacaaatttctaatgacctatcttaaaaaatcttaaaatagcaatttacaaagggcatattccaacaatttatgaaagaaactacatttgactgatacatttatgaaaatgattaagacttagatgtaataaatgaaacataacttgagacatatttttcatcttttgaaatagaaaatactttgagaagaaatattttggattgataagaaggcacagagatcagactactattttatatgcccrgcaaaagattaaacaaactataaaacaaagaaaactgtctagaaaataattcggcaaaatattttcttcttgctctttggttcagaaacactacttccaagaattttaccctaagaagtaatgtaaaacttttagaaaaagtatttgtacctattttaaaagctttttatgttagaaaacaaaggatatataaatgtcaatagattggaatataatacaggcattaatattgwtgcttataataatttaacaaaatgagaccatgctaatacacataaactgcaaagcacctacatgctgtaatgtattgtacttatatacaccaaaacactgaaagaagaatgctaattcattacaatgatcatctgtggttgccagtcttattgttaattattattgttttcttgtatttttaaaatatatttttgatttttcataaggagcatttattattttcataatcagaaaaaagcatttctaataaaagaaatttggttggaaatgtatcacaaaggaataataatgttagtataacactgcctattacccactaacctcaagcaaattagtagattctttgtacccatgttgacaatttggtttcccgtcttgccatttgttattccagtgaatgactgctgtgwtctttagaggaggtgacatatccagttaatcttagtgaagtttgaggcgattagtwtgttattcactcttccagccaactttttcctattgagggtttggagagtgaagtggggtgaaggcaacaccattcttattgctaaaataatttaataaggatagttatataaacaaagcattaagctgtgaagagaaattgcccataaagtataacctactaattttctgatcctccttctgttttacaagattgatatttggaaggtgattattttactctttcaggatttgacctttgataggaatcaactccctaaggaatagtttggttaaactaaaccttaactgaattccaagttagtaaggaactcatcctcaatagggaagagaaaaaattgcagtgttttatttttttttccagtcagaacagtgtataactacattctacagttaagcaatattagatgtagtctttgggattctgatatattctcagtttactgcttagtgctgtagtatttttccattatgtgctgctgcaagaattcaatcttcccaggatggcatattgaacacaccttccatgtggagagtaatgccatgtcctgaagatagtcccctccattctcaacatttttaacacacatcwtctaatgttgacatcaaggacatggagagggccttagtcatcactgtccttggtgggggacacttagagtactttgggactcaacctcaggcatttcctcatcattctttgtcactctcattctatagcaagtcagcatatctgctactgttccagagtttgacccaattatagtagaatttcaaaggttgtggtatcaaaattaaaattctggtactcaagawtgtgtttataactttagtgatacacatagaactaactgttggatggagaaagttcgttagcccactcacttctgtgtcaaggtctttattataggaaaagcttaattcccattgtgaatgggcaacattttcttttctattcctggctttcccctccagttctctttcttttcagcatgtttccctctccttcagaattccaaagctctgatcttccctccatcctaccctaaacttgccattgagaaagaactccatacagtccttcatgctcagacctaaatgtaagtttacaatgaggtttctgtcattcyttgtgtcatttgcatttaaaagggcccgaagatctaggtagtctaccaggattaaattctcactgagtagaattccttgagtgagcagatctgtcaggtgtattttaggggttggtgtctctttcacccagccagctacgtttgtaattaagggcaacactgaagtttatctgctccactcttaccctcctgcttgcatgcttactttcatccttgtgggggccccagtattatgccttcaggtgggcccaaacagactctcattcctccaatattgtcttaactcattactaaagtgttggttcttctggccagctctaatgataacagcaacggcctgtctggagtggctgttgccatgacactggctgcagtaggggaggtgtggccagggctgagccctctcaggaacagatggaagccctgcccccttccaagttggaggggcaggaacctcactcccccaggcaccactgcagcgacctagctgcggctgcggaytcaggcatctctgcacttttgggggcctgggaagcccctttgcccctgcaggatcagaagtacctgctccctctgcctggcctctccccactcccggtgcctgctctgatttcagagcaaagttaaggctgagcccaggcactgtcgcaacctggccaggtgcatgcatgcacacttggggcagcactaacacaccagccccctgccaccttagccccctctggactttgggcactgaccagcatgagagggaggccaagaaggggctaagggcagctcagtgttggcttgcaggcaccccttggcatgaatagcctggacgccatgggcactgtaaatggcaggttaatgacaatgggaggcagacaggctcctgggtggaaaggggcagttccccggtgaaaccccgccttcaggccagttctgcagataggagtgagaacttgccgtgctttttctgggcccacccatggctgcccatggaccaatcagcattcactacctcccctctgaagcccataaaaaccctggattcaagcgactcaggcaaatgatgagctgaccatcatttggtcagagaggagctacacattatgggtctcctctttgctgagagctgagcagacaatgggatgccctgcctgcagagaaaagctacccactgcaggtctcctctgagttgtttagtaaagcaccctttgccttgctcacccttcacttgtctgcgtacctcattcttcctggatgtgggacaagaactggagacccaccaaatggtggggctgaaagagctgtaacacacacagggccaaaacacaccccttgctcaccatgttgtggtctactagaagcagagaagagctgcggccctttggggagcccagaccaaggaactccctgagccagggatgtgacacactcttggggctctgcggttcctggtgtcttcaagcttctgggcaccactgcgttccccagtgccagccgtggaaactgcttgtggtatgcctggttcagctacagccttgcagggaggtggcacccatgcaggtgcctggagctgcccaccccgccacagccagcgtgcctggctgtgcacagttgctggatcccacgcttgcttgctcacatacccctcaccactccgtgcctgccttgcccttggcatgcgtgggaaccaggccagtagcgcgagctgagcgcagcctgccaggccgagtgggcataatgagcctagcgggcccgagcaaaactcaggcaaaggcgccatcagccacagaggttttcagccagaaaagcaacactccaaggatcctgtgacactagtagcagtaggaataaaatcagaagcaattcccagctccaacacaagaagtttagccctggaaaccttagtttgctttgactactttatttacacacagtttatcttttatgtcatcctcgggccaacttccttataatctgctctatagagaatctcccactttacagcttaaacacaggaaaacagaccctccccrccagaacgtatttattcagtccaactactgtaatagaaacatatagcctctctgagtccagtagcataagaacaattttacccatggtcatgcagaagcttctgcttatatatttgttatatacataaactgtatatgtatatataaacataattaaaatagctattgggtcattattacaagtgaaaatgcaatctacaattgttgatgagataaattggcagagtatatctgcttctggccagtccctctcattccgcaaatctcttttggaaaatcctttccagccaccccctagatcccaaccttctcacccctgacacacatacactctactggcagtcttcagttatctagtgaatgatttttttgagatcagcgccataacattatcattcagttgagaaattgaggctactcagctttcattattttagccataagtacattttcttctattagccatgtaaaataggcccagtgctaaaacattttaaatatattatcttgctcagccttcacaataacttattgttgttggcataattcmtcttttacagatgaggataccgaggctaagaatggttgttgcttgtctcaagttaccattgtgcacagggctcaagacaaattccacagaatcatttggttaaggaacaggctttattgggggaaatttataggctggtgtcagcaagagaggcacacattcctgaagcctcttggcctcccacagagaggtaagccagggccagtcccttgctggatacatagtgggtttatattacattaaagcaacattgcctgtgattggtctctgttcttatagagcaagaagaagagactctgcagacaggctatttgtataacaggtataattgtcagctgttttccagagttttctgaggaagccagctgctcaaaacctgggaagcttggaaccaatggaaagatgcagttgctcctttgcgggtgaataaagcactgtaacaccatcaaaaaaggtgtgaaccttttttttgtagaggaaaagcgagagctctcattgtgagttattttattgtccagggaactgagagaaagcattcccagccactttttgaaaagtctgcattacatgccatagacactgtgtgtctctgtgtgtgtgtgtgtgtgtgtgtgtgtgtgtcagaaagagagagagagaaaatagggaaaggaggggcagaatttaaaccaagatctctgtgactctaaagctggtatgttatctatttcctataatacttgccaaacttctggtattttttgccttctatctgcaacttcctaaactcactctcattgccatctagctcagctctactccaccccaagacaactatacttctgttcactctttttakaaaccactgggaatatttattctaagcgaaactatgtctctaaaccccagagacctcttttacctttccttaattatacttagggctctattcatcaccgacctcccttgaaaaatttctctagtcaagagtactgctctctcactcagctgcataaatagggcttcagaggactcagagtgcttttttgcatagagatccttgctcctttaatttcctgaaaaatatgaatgcatgtttccaatattcactttacccatctatgacatttttttgaattctcatccctcctacatttaattgacaactccttctctgtatttcttaataccctgaacatacgtatatgagagaacctggcacaaaggttttatttacatgtatcttctcctactggatatgagaattttatgggcattcagacagtgaaaaacaaagacacagaatgtgataggatatttgcaatatacataatgattgaaatgcttgtatatggtctagaatggctatttttttaaaaagcctacaaatcaatgagtattaaaaatacaacccaatagaaaaaatgagcttgtgatttgaacatggacttacttcaccaatacaaagaagaaaagttaaaatggtcctaataatctaggaaatgcaagttaggtccagtaatatggaaatgcaaatctaggtctattaatctaggaaatgcaagttaaagataagatagcaacatctgtctataagtatgactaaatttaaaggaaacagaatatcaggtcttggcaagagtctgaagctgtaggattcttgcacactgttgtgaggcatgtagtgtcctaaaccaccctgtaaaacagataggcaatatctactatgtttgaagacaggcataccagatgatctaccaattccattcttggttacatacttagtggaaatacacatccatttacaacaaggcataaataaaagcatatttgtagtagtaatgtgcataatagctaaagctagaaacaacccatatattcattaatactagaatagatacataagttatagtgtgtccatgcaatggaatgctattcagcaatgaaaataagtgaattacagataaccataacaatggagatacttctcacaagcaaactyaaaagtggcctakcagataaagttcaagtggagakaaagtgatttcttttatgtaaagttagaaaaataacaggcaaaaactaaactaaaaggtttaggaatacactgttaggtgaaaatgattttaaaaaatcaagacaaagtttatcttaaaagtcagagtggctatcaagaggagagatttgtggttgggagctggtatagcggggcacatacatgtgtggtggggagtgacccccagatgtgccaaccgtattgcatctcctgacctgtgtggtggtcacgcagtgcttgttttgtaataattcactgagacatgtggtttggttttattcagttttctgtgtatgtattgtattttatattttaaaagcattataaaaagataaaaactggtagacgcaagctactggaattgtagggtgacaggcaccttgagagggacaagacaggtcaataattcctgggctggtttttcacatatctttggatagaaggaaatagtaatgttacaggatccgtggggtgtcgcttttctggctggaagcctctatggctggtggcacctttgcctgaattttcactgggcctgctgggctcattctgtccacttggcctggcagggtgcacttggcttacactactggcctggatcctatgcctccaagggagactgtgagtcaggcgtggagtggtgagtgtgagtgagtgtggggtctggccagtgtgcacagcaagacacactggctgctgctgctgcggggcaggcagttccaggtgccagtgtgggtgctggctctctgtgaggctacagctggaccaggaggactgcaaacagcttctccagctggcaccagcgaatgcagtagctcctggaagcttggagatgtcaggaacttcagggccccaaatagggagtcactgccctggctcagggagctcccagagctgggctccctgaagggccacagcttttctctccttctcttcacccacaacgtggcaagcaaggggcatgtttcagccctgtttctattacagcttttagccttgccattcagcaggtaccaaggtcttgtcytgagtccaggaagaatgaaatatgcagacaagtggagcgtgagcaagacaaagaggagctttactgagcaatagaacagcttagaagagactctcagtgggcagctcctctctgtagccagggcatcccagtgagtgttcatctctcagcagagagggtagctcctctctgcatttggtcatcccattgtctcctcaactttcagcagagaggagaccctggggtgggcagctcctctctgcagcttgtcatctggtcatctccccatcatctgtctgtcctctgcttgagtctggctgagtctgggggtttttatgggcctcagaggggaggaagtgcatgttgatcagtccatgggcacccacgagggcccagggaaaagcgctacgagttcaccttctggtatgcgggaatggctcccagcccccagggttcaggccctcctcagcttgaaggtagggcatcactgaggaccttcccccttctgcccaggagcctgtctgccgcctgtcaccattcatcgcacccagaccgttcatgccaaggkgcgcctgcaggccagtaccccgctgtcctcagcaccccttgtgcctccctcctgtgcttgtccacagccaaagtttagagggagccgaggcagcaaggggttggtgggtcactgctgccctgagcatatgcccctggccaaactgcaacagtgctcaggcttggccccaaccttactccaagatcagagcatacactgacagtggggagaagccaggcagtggaagcaggcacctccaagcctgcaggggtcagaggggccttcctgggcccccaggaacacagagatgcctgggtccagagatggggcagagcagctgcagctgcacccagggagctcccacccagctaactcagagggggtgggtctcccrcttgtccagggctcttgcaggctccctgaagcatggtaccaccccaggcccggctccgcctcgagtcccctctctgstcacccctctgtgcccaaccacattgttcccctgcctgtaggcaacttggcccggccccatcatggtggcccccagggtggtaggctccagggggtcccccaggggaagtctytagggactattcgcctcttccccatgaactccccatagcagtggctgtcaagagtggcaagcggggccggggcctggagtgggtactgcccggctgcgtgaaggtgggggcagtgcagtcagcttccttggggacgcagggcacaggggtcccatggccaccactgctgccctgcagcctctcctgctgctaccacttgtgcctccttgctgtagcaggtgtaatggcaacagctgctctggatggcccaccgctgccatcagtaacacattaggccagatgctagtgcattgcttgcctctgagatcacactgtggaaggtaatgaaggatgacatgaaagtccatattttcagacttcaacaacttgtggctaagaaaataatacaaacaaaatacacagaacacaagatgtacrggctcccatctcctaaactagtagaaaatctagactttacccaggctttccttacccagataatccctagaatctgcagttttggtcacatttaatcctgagcctgtctgkcttgctacacatctatgacactgtgctggagagatgcaactccattatactccttcaagccagacttttcagaaggtgctcttgggtaggccacttactgcctccgatggagccctggtgccattgaagtcttacaggtctacagctatggtagataatcaaggccctttctcttgctaacctagtgcattccttgaggacacctctgtcccaagtgcagagctctgccactccccctgaaatttggtccatcaaagtgtgaaggaggatattctcttccagagagtcctgttacaaagacacaagttacagcaagaatcactgggagccgggtgtgataatacacaaagtgggccactttcctgaagctgagtccttggacccaagaggattctagcatcagccccagtctgctgtgactacagtagccttcctcttcaacagacagatgctaggttcagagtatcagcctacaccgcccactccatatacagtgatcgtgccctaagtatgattttttttctttctcacgttcttcmttccatttatttccctgtcttccatcctctctacttctttccttcctgctcaccttcccttcatccacaaatatttacatgctagatattacgctaggcaatgtagagtacagtagtgaaaaaattcaacatgatccctctttcayggaggttactattgcctgcctttttggctttatttggggttatctaaaaacctcagaaatgttttaatgctatctcacacaaaagggagtgcagtccaaattcattctctcctgggagccttttaatctactattaactcatcactcatggatgaaaagagctatgggaaggaagacccacacatcatccaaagaccataagtctttccaacaaaagcaatcaatttccagactcctgtctggacaaaatatcttgtttatgtaacatatattatatgtaatgtatttaaacacctgattgaatattaagaaaagagcattggattttatttaattaatrcaatatatacttgaccttcagtaaggtttacatgtgaacaattaagtggagagatggagggaggggagaaagaaacacctaggagaaaaggataagggaaaattaaggaaaaagagaaaggctcactaggtctgaaatacttttgcactttatgttgtgagttgaagaatgtgatcaccttatctctgccctgtgaaaagctaatgaattgtttaacaagagtttcagctccttagcttctctcagcttgaaatatcagaggcttcattgggaatgagttagtcatagcaccaaacagagaagaaaatgagctaaggcaacagcacagacagaccaggttaatgtaaggctggttagatttaaactaaggccttgcctgggtactttttaatgccacaataattcaattatgttagggtggggagtaggaaacaattgtgggttcagcaaatgtagagaacaagtttctcacttgcgcaggtttccctgcctttccttcaccatttttctgactgctgtggtctgcttattcagtatatcctaccacaggggtcacacacttttttttgttttgttttgttttttttgagacagattcttgctctgtcgcccaggctggagtscagtggcacgatctaggttcactgaaacctccacctcccaggttcaagcgattctcctgcctcagcctccagagcatctgggactacaggggcgtgccactatgcccagctaatttttgtatttttagtaaagacagggtttcaccatattggccaggctggtctcaaactcctgacctcgtgatccgcctgcctcgacctcccaaagtgctgggattacaggcgtgagccaccgcgcccagcccacacactttttctgtaaggagtcatataataaatatgttaagctttgcaggctagattatttcagttgcaactactgaacttttctgttgtagcctcaaaacagccatagacaataggtaaatgaatgggtgaggccgagtcgccagaaaactgtctttgctaaaatattggcaggcaaaaacagtgccgaccattctttgctgacccctgtcttagtgaataagagtgtaagctttacataggaaacaactgagttaaaattaaaactatcatctacaagatctgtaacctttgccaaggaacttaacctctctaagcagctgttttctcatctccaaattggggataataaagcctcccttatgatctcatgagaaataaatcagatggtttatgaaaattgcccaagacagtgcctgagatgtattatgtcttaaatagaggacagctgtcattattagttgctcactctccattcatgcattcagtcattcagatatttagagagtgcctattgtgtgtcagatatttagtacagtagggatataataatacataatttctatctctgatctaaagggactaaatagtatagaagggaaaataaacgtgtataagcatttatacggtaaggaatcagtgctaagaaaggtaccataattcagaaatgctttgggaactactaagggtatatacatttatctagtttagttttgaagtttcctggctttgaatgagactttttatatttagagaagttgctaatttatttctatatattgggttgggatggctcatcaaattcaagtaaaacatactcataaaggaggaggaattacccatgataattaaccgtaaataataaatmcagtaaataagaaggaaacagccttcaaagtttaaagaatggattttctttttctggaaaacttgcctggatacataatcattgtcaattaaaagtatgtgtttagagaaggtgagatcattgaagctattgtgctcttgaatttatcaactgaaaaggatccttcttgtgtctgcctcttaaagcatgtatctagcaattgaaagtaaatacacctcagtgtgatgcctggaagtctgtgtacttgggaatgagacaaagtccctgctctgtcactggtgattgattcagtctgaaggagaaccctcaaatctccaagttgttgagtttcagcctggcttttgttttctctgatgaggaatagctccagggataataatgcatggatagtactttttctgtctggtttgcaatcttatgttaaaatgtcattgccaggaggtggccagtagctttggagtcatgaggaaagtaccttaggtagatttagctctcacgcacaccaacaacagtggcagctctcaggggattgtggagagtggaggatggaccactcttagaagggggtcagagctggtgaagaaatgctgctgccacagagcagaagagaacaacttttgctaaatcatgagatacctattgaggaatcctaaaataataggggggagttctagtgggctagctattctgcatcagtatatggggcaagaaagagaatgcagaaagggcaagaatgagtatgcagaaaatggggtctaataaatatagggattaaggagtcagagagctggctgcctaaccacttattttctctacctacttactgttctttcaaatatttctaaagtacttataagtatgttcctgaataacttcttattaaactctaaaaataaatgtattttggtttttcttgtttaaagcaatcacacaatggacaggggaaaggcggtagtgatacacaggtgaatacatacgtgtgtgtgaacagcaactaacaagggaaaattaatcacgtaaagagtaaccaaacacacacttcaggggcttctgaaaagcactgagggctttgctttattagaacgagtggtatctggataccaataaaagctggagaaaacaaatatttctgggaaaaccacaaaattagttattcttacattctcctaagcaaagcatgctactaataatgttagtcagcagtgcaccagggcagatagacaatgataaaatggttatattagtgacaaataggttacttacaggagttattaatctaaaactctccttccttacttggcattattaaatggattgtcttgtatgccactgagaggcaagacctaacaataagaaagaaataattggaaaaattcacacatttaatgtagaaatatacygcacttcttccactgtaatatgtattgcaaaacaaactttatataataataatttatttgctgcataaagggcattaaagatacctaactaaaaagcaagtctcaattatttaraaacttgaacatatgctaataattcttcttgatcaaagaaatgtgggttatatatttcaacactcttattgaaggttgagcaggctggtcaggcaggactagaggtgagcttatattctcacctcttcttgacagtcttctgtcaatgagattgacagttttctattcataatctcatagttcgtgcaccataaataactaccagttgggagcttgccrtagcagagatatgccactcatgctataaggactttgacttcagttccatttgcgcatctcactcattgtgcaatctggggtgagcctcctatttattaagttccatcttcatctttttttttttttctgagatggagtcctgctctcttgcccaggctgccaggctggagtgcactggagcaatcttggctcactgcaacctccacctcctgggttcaagcgattttcctgcctcagcctcctgggtagctaggattacaggtgcctgccacctggcctggctcatttttctattttttagtagagatggggttttgccatgttggccaggctggtcttaaactcctgacctcaagtgatctgcccatctcatccttgcaaagtgctgggattacaagcatgagccaccacacccagcctattaagttccatctttaatgagaccctctgagaaaaatagcccttgcatctacagattgggtttcatcaccctattttatgttctttcagcatcttgtacttctcatgtatggtgattattataatttaattatttgctaattacagctgagtaatgtgggtcctaatcaacactatatttccagcttctaccttactatctggcatatggttgatgctccatttatatttgttgagtaaataaagttgtttcactctctaggcattagtgtttccatcagttagataagaacattatactaaaaggtctttatagagttcttccagcccttaaattctgtactaattttgttttaatgtatcttcatttaaaatcttatatcagaggaaattctagcttttaattatgaattgtttgtccatgcgtccaaaaataatagtagataaaatacacatgtgggaaagatttcctgcagtatgtacatttgatgcaataattttagacatgtaaaaatgaactgcaataatttaaaaatgggctagcagagcattctccattggaccacaagcttcttgaagggaggtactatgcttactcatcttttaaactgtagttctagcacataccctggaagatggcctacagtctttactgaattaataagggaggtcaagcgaaaaaaaatggtggcaaaatagaaataagcaatgcaatggaaagctttgttggcagaagcctgaggagcttgaaggaaaaatgggattagataaaggtactcaagtgggatgttttaatttcttattaatgatttacaagagttttagacaaagacatttctatacttaaaaacagtttccaaattaccagttacaatatttttatcatttaaatttaatacaatagagaggaccgagtgcttaattggagcaacctcccactcctcactgttagtcaattttggaaaattccatctcttcctgaaattaagatactgtatgcaactgtcaccgcaacctggatatctgtcaaaaagaaggaagtggcaagcacactgaagatgggtcctccaggcagctgagtaccacttaatggaaaactgtttacaaaataattttttttgacagagtacttctgagaagtgctcttagtttatcagaaagaggmgagctgctgtttgaaaagtgctttaagtttggataaagatatttctcttaaaaaattctgcttcattgtaatttttcctctccttgccccccaaaagaatgtttcagaatcaacacatttctccttccaacttcacacaaatataacactcagtggcttttttatggatgaaagacgtgagctactcagcagttacaacatgaccaaagatacttcagaatcagattactccacggtattctttgttttctttgaatcaagaacactagtctatatctacttatcaactattaaacataaaccaggtatgtcttaaatataaaaaataaactgtaaagagtggaagtgtctttttttagatctgcgtaaatcctaaccttcagaagaagtttacaaagaaaaatgatcaaactccagtactaaatataaaatcttatttttttgagttttaaaaacatctattgtgaaattgagcacacatagagaaaattgaacaaaacattgatttaaagcttaattgatctgcactaagcgaacaccatcataactaccatcaggttaataagtagaatgttcccagtgcccaggatgcctcttccatgcccctagttatcagtcgggattccatcagaggaaacagtgagagctgctataggagatgagagttgttccagggacttgaccttacacgactgtgggagcttggtgaacagttagtttgttttaatttgttatttcaatacctttacgaatacaaatggtttttggtttcatggatgaactgtatagtggtgaagttggcttttaggatacctgtcatccaaatagtatatgttgtacctaataggtagtttttttatccctcattctccgcctcaaaactccttctgagcctccaatgtctattataccattctgcatgcctttgtgtacccatagcttagctcctatttataaataagaacacgtggtatttggttttctgtttgtgagttacttagaataatagcctatagttccatccaagttgctgcaaaagatattatttcattattttttatggctgagtagtattccatggtgtatatatatgacgttttatttatacactcatcagttgatgggctcttaggttgagtccgtatctttgtaattgtgaattgtactgtgataactatatgcgtgcaggtgtctttttgatatggctttttttttttttttgggtggatgcccctagtagtgggattgctagattgaatggaagacctacttctagttctttgagaaatttccgtgctattttctatagaggctgtactagtttatattccaatctccggtgtgtaagtgttccctttcactacatctgtgccaacatctattgtgttttgattttttaaataatggccattctgactgaataggtggtatctcattgtggttttaatttacatttccctgatgattagtgatgttgaagatttcttcatatatttggtggtcatttgtgtatcttcttttcagaaacgtctcttcatgtcccactttttaatggtatcatttttttcctgctgatttgaattccttgtagattctggatattagacctttggtcattgtatagtttgcaaatattttctcgcattttgtgggttgtatgtttactctgttgattattttgctatgcagaagctgtttagtttaattaggcctcatttatttctttttattgcattygcttttggggtcttagccacaaattcattgcctaggccaatgtccagaagagtttttcttaggttttcttctagaggctttttggtttcaggtgttacatttaagtatttaatcaactttgagttaatttttatatgtagtgagagatagagctccagtttcattcttttacatgtggctttcaatttacccagcaccatttattgaatagagtgtcctttccctagtgtatgtttttgtcygctttgtagaagatcagttggttgtaagtatttggctttatttctgagttctctattctattccattgttctatgtatttacttttataccagtaccatgctgtcttggttactatagccttgtagtataatttgaagtcaggtaatgtgattcctctggttttgttctttttgcttggtatttctttggctattcaggctctttttttggttccacatgaattttaggatattttttagttctgtgaaaaattatgttggtattttgataagaattgcattgaatctgcagactgctttgggcaggatggccattttcataatattaattcttctcattcataagcatgggatgtttttccatgtgtttgtgtgatttatttcagcagcatgtgatagtctccttgtagagatctttcacccccttggttaagtatattcctaggttcatttgttctttgtagctataataaatgggattgggttcttgatttgtttttggtttggttgttatcagtgtatagcagtgctactgatttgtgtacattggttttataacctgagacttcagtgaatttatcaaatctgggagtcttttggtagagtctttagggtcttctagatataaaattatatcatcagcaaacagaaatagtttgagttcctcttttcctatttggatgacctttcttctttcttttgcctgactgctctggctaggacttcctgcactctgttgaacagaagtggtgaaagtgggcatcctgatcttgttccagttcttaggggtgagcctttcaacttctgcccattcagtattatgctggctatgrgtttgtcatagatggcttttattattttgagctatgttctttctattcctagyttgttgaagatttttaccaaaaagggaggctggattttagaaaatatttttctgcatctattgagatgatcatatggtttttgttagtacttctatgtatgcagtgaatcacatttactgacttgtgtttgttgaaccatccctgcatccttaggatgaaacccacttgatcgtggtgaattatttttatgatgtgctattggatttagcttgctagtattttgttgaggatttttgcrtctatgttcatcagggatagtgacctatagttttctcttttgctgttatttcctttcctggcttaggtatcagtttgatatgagctttgtaatgagatagggaggattcctccttctcaatcttttgaaatagtttcagtaggattggtaccaattctttttgaatatatggtagaatttggctgtgaatccatctgattttggtttttgttttgtagggagatttttttttaaggtattactggttcagtctcgctgtgtgttattggtctgttcaggatttctgtttcttcctgtaaaatctaaatgttgctaatgtttggtttgcatcaatgttgttgcttcaaaccaaaggtaactactgatatcttgatctatgtactttgtaaaggccctacctccaaatagcattacatttakggttagaatttcaacatatgagttttgggtggacacgaacgttcagttcataaaagattatttgagacacaaagtgacttgcctggaagttcctttcttctcctcaccctagcccttgaagaatgaagggatcaatatttggcccatatccattcctacatttatggcatgtctatgtactttagctctctaacgagaaatgtgaccagaattctgattcttttttccccctattatttttccttatctaggttttgtgcttactatgtacaaatctgacggtgattgccagctaacattgatctatgtaatttggmtaaatggccagcagcctgccttgttgccatggttgcttactctaattwttctttttttttctgggggctacatgatattcttgggaaggccaattgtacttttttcctttattatacttatttcattaaattatagttattttttatttttatactgtgagttcttgaatgccaagacctgcaactaattatttctccagtatatttcttatagtataatagatttcttagaaacctaagtttgacccattcagtggtcttattaatgtgatacctaatgtgaaaccagtgctattaagatgctttgagtatagacacaaacagtgagtgtttctgtagattcaaatttgagggtgtaccaactgaagggaagacaatgtaccctcttatttaggggagaaagaatctcaaatagttcacagtaaacgttatcagcttcatttaaggattatgactagggaaaaacacgctgccttttatattcctcagttgttacaacacagacatctgtaagtctacttagttgctatttggggattattaaatctctagtaagcagtacagtagagctggagtatggattttgtggaatcagtggcgtgagtagggaaagaaaataaatgggaactggccagcaggttgagagatggaataagaatcggaagagattgaattgtagtgtttgagttaggtagaaatgatgttcaactggagtgcagtttatattgtactgaatcagttaatagaattgaggaaaaggtctatattgatatatttaagttctcaagtcagtgtgcagtatcagtgaagaaggctaatcgaacgccaactaagattagggaaaatattaataatatgtaatacttctccagagtgtctcataaaactaaagacgctgagttggaaagtatcttagaggtcatatagtctacctctcccactatctccttaacttttatatttaatacatgctattaaatgttagaatttggagcaacacattaggagggattaaaacactcaaaataacaactaaaaagttatcagttattaaaattcagcatctaccatgacgaatttgataagcatgatcttgctttctaaaaggaaaaagcatagcaagctacactttgtatctagcagctcactcggccccacacacctgtctataaagacagtgggaggatgggaatccatgtgttcttggtgtgttgatcctgtctttgcatgtttcctctttctccagtaaagtctatttctagtgaggcaacatagaatttgtctcaaaccattgtgcattacatggctaccttaagtggatccactttgcaagacacctgtgtatacatcctctaaatccattatctcccacttgaaagtatttccctaaattgcccaagtagtgttgtaggacttwcccttagttcaactaaagacagggtccttgtctgtcccaaagccataaaaacgtaggcttgcagatcatctgaacagtgagtaaggagggttttgttgggggaaaaggaagaaaagggagaaacagggactctcacaaggccagagtccctgctagagtgcttcctgacaggttgtttgaatcccaggttccacataggaagaggaggaccgcagctcctccctgcttgcaaagggtgccaacttccatggctccaccgcagtgggcaggccgcttggagtttctccaggcaccccctcccacctggctgtctcataccaccttctagagaaatacatctaactgccattagattaaggatagggacaaagaactatcttaactgctttcgcctgataagggggcactgttttggggaaacagcaggcagatcaccctcagaggcctatctaagggttcctagtagaaggggccatgtgagaggctctggttacaggagtgtttggagtttgatgcttgaaagtaagaacagayacaccacgttattagaaaacatgtatcaaaatgaaacaaggggaggggtaaggatagctcaaaaatcccaaggccttttaccagtttgcatagggagagggaagccaaaagccctactggaagaggaactttacccttttgccagcatgttgtgcttctgggttcctttcccgctgagcttgatcctgagccaacaagtttaaggtttggaaaattaacttttcccagtttggaggattcattagagggaagtgtctaatagtacagagacatgattacctatttgtgaagagagaccagaggaagagaaaagagaaggtgccttttaaaggattcccaggggtttaggatgcagtctaaaggggtacagagtgaatataaatggctacccatctagaaaaaggggagcaggcatccctggttcctttcttttcctagcagatacccacagtacatgaggaagagagggaagagcatcctcttttcctcttctgtccttgcatccccagggtccagtgacctcggcagatgccaccatgggtgtcaaagtgacttgcacccatgaagcagggaggacctagagaataggaattacccactctcacctatgccactatctcygctactgtcagtagccttggagttccttagtcctcatttatgctatggatattaacatggcctttattcatgaaagcttggggttggtttaatcggtagaaatcagccatgctcacatgtgctatgccttttaacttctgttattgtctgcctctggatccctcagatccagttttccttcctagggtttttatctgaagcttggaattgagtttcagacaaaaatgtgtctcagcgggggtcgcatggactccttgtcataagccaaatgctaaggtcaaactggagctgagttctcctccaacaagagagaggaatggatgtcttgtgacacacccagataactggtagccatagttatgcttgctgggatttcggtggatgacacttagctttggttagctacgttggtcttactttcccaaaaaggaaacctctgggttatgggcatcctatttattcccactacctggcaggatttgtaggataactgttcagaactagactattgatccagatttctacattacccatccctcttgttctttctgagctgcagctggggatcagtggttggttcacaggaacaagtagggttgatctaaaatgtaggtgaaaacttgaaaatgactggtgagtttagaatttaatgacaagcatatgataagttttgaaacgtgatttctctcttgcaagtcctcatttttgttaaatatcatcatgatggaatgatttataaaacagactttagtcttatacttggcctggttatttgcataaagtgcagcaagaataactatttctacataggccttttgaattggctttcatggaactctgtttcccaaggaatcttagataagaccttttaaagccaagcccagccatgggtttgtattgtcaaatacccgtgagttgggtgattttctcctcttaaggtcccaagacaaacttggagctcctggacctgttagaaagtgacattctttactgaccacaggtcaagaaccctgtacagggactacatggacaagggtatgaggccagtttcccactagatttttattggctctgcaagtcaagattgactccttaaagggaagcatacccttccagtcaaaaccctggtaaaataactacgttctctaattgtgtcctgttgcaaaagaaaaatggattcttattgtactgatgcaaacaactatattgccataagaatactgacagatagtttccaaattctagaggaaccaggcagagagaaacaaacatgctccaaattttgaccacaggagtgtatacttcacttaattattaaaggtcgtaaatagttcaaactaagtttccttgactataaaaaaaactaaagcaaggatcatcaatattccaagcaaaagtcaaaaagatttgctttagcttcctgagttcagtccatttacttaactcttgttttgcttgacattcatgaacatttcagctctttatgagtcctgtactttttcctttattccaatgttacagtctctaaagttatcagaagcctgtatttgaaagtacctgttaaagttgtatagcttattataaaccatcttttgaaaggattaaaacaagacaacaatcgtctgtgaatwacaaaatgtccagggtagttacagttagacacacaattgacaaagaagttttgttatctctgttttacaataacttaacataacaaccttaattatgatttatggcatatacttagaccttagaattttagaaatcccatacaattttggaacatatattagtattatccaccaagatataacctaaagaagattgagcatcattttggcaatctcatatacctaaacatgtcaaataatcctttttacctctcttttctagacacttcaggggccctctgaagtattcaaaaaaccaggtgccagggaagacaattttgaaactgaagtttgattttgggaaagctgttaaatatgtttaaagcacttaatattatgaaatagaattccagattaccataaattatttattttgccaaaatgactcagaaattttaaagaagcaaaaaccttttataacccttttgaattttgttaaggagcagattagcattttaagaataccttgttgttcttatattttaatgttcaatttacagaaaaaccatataatacccttttttgaagttagtcaatatgttcacccagagaacctcttctgcaagattaatttccccagttcttctaccacttgtttgaaccttcggctttctcttatctaatttaaaacaatcctttaaccctaggcaaaaatttatatttccatgccttcttataacattttacaaagaaaaagcacattttactgttcttataccccttgcatgtaaatctattttgagtagtctcaattacctgttataatggtaaccccagcaattgttatctttaaggtgaaacttgttaagttgctttaattgtgtgctaactgcaaccaaggtttgactatagcataataaggggcatagttagttccatagtccccaggccttaccaattgtgaagccagcaagtcaaatagttctcaaaacccaaaaagcagtttgtaaactcacaacacttagaaaactttgcatctgacctgcattttactaatagtccttaggggtgtttttatttcttaaagattaaagtcacatgaactgaaaggtaccatagattttatcttccctttaaaaacatcagatccaagcaattgtctttcttttggccaaattaattacagcttttttttttcttgttgacttttttttaaaaatttttaattttactttagttccaggatacatgtgcagaatgtgtaggtttgttacataggtatacatgtaccattgtggtttgctgcacctatgaaaccgttatctaggttttaagccccacattcattaggtatttgtcctaatgccctccttccttttgcccctgactccccaacaggcccgggtgtgtgatgttccccttgctgtgtccatgtgttcttgctgttcaactcccacttatgagtgagaacatgcagtgtttggttttctgttcctgtgttrgtttgctgagaatgatggcttccaccttcatccatgtctctgcaaaggacatgatgtcattcttttttatggctgcatagtattccatggtatatatgtgttacattttctttatctttattgcagcactatttacaatagcaaagtcttggaaccaacccaaatgtccatcaataataattagagctcttttgacagacattacacacaatacacagacaggcaaaaggaaacccagttgctgggtgaagcctggcctagtaaaacatctaaaaaaaaactttaaaagttaactgccaacagaatggagaaggggaaagaaaaaagaacagtttaaaaatgcctggggaagaacctcttattcttagataagtggtccctccaccaagagaaaagcttatttactgtctgatggagctgaaccccttgaccagggaggtggaaggctgcggcagcatgcctggctgcgaaccagccagtggctgtgcaggacccttgggccatgcgtcccagtgctggcagggatgggggtggcggtggggagctgctgctcacaggtgggtctcgaaaaaggaaggaaaaggcatgaaaaggcctgggggagacagggggttgggggcatggttctccaccctcagaagtccagggatgtaaaggcttagaaggaacagtaagagtttcagtccccatttcactcactgcttcttgagtccccacgttgcaggccaaaaatgtttcaggacttttccttagttcagctagcgatggggtccttgtccgtcctacggctatgaaaatktaggctcacaaacagtttgaatggtgagtaaagtagggttttawtggatgaaaaggaagaaaggggggtaaacagggactctcacaagcccagaatccccgctagagcacttcccgctgggttgtcggaatcccaggttccacccaggaagaggaggagcccggctcctcaccgctgcaaagggctggaacttctgtggctccaccccagtgggcaggctgcttggagtttctccaggcaccccttcgctgtctcagtaggttgctggtgtattcagtccacacagggtgtggtttttgcttctaacaacagataaaggtcgaagcaaaagtatggcagtctgttcttgctgcttcccgtggccacatgttgctcttgcatcctgtcctctgccatggtgaggctactgctggtctggatgcactggtgacaccaccgtggatattcagttcacacaaacatgctcagctgttgtgccacgaagtctccccacagtgccttgcatccagagcagttcttggtactagtcagaagctgtgcccaacagctttgcctttaaatacctgtcttgggcctggctcaccagcctacatcattctttttccttttcattaaggtgaagttgtgcttcccttccaccttctcctcagctttgaatcttggaagtccattgtcagattctcattctcttttccttctgaagcttcaactttgcattgtagtagctttaggaagttgtggtttgatcaattacaaaattattttctgttttgatcctccctgaataattggcacattttccttctaaaattacaaagaaagactactcaagcaaaaataatttgcttcaaggtgtatttctgtaagcttcaaaatattttaagaacattctacagtgacaccccaattaagctttacatttgtaggcatcctgcttcctgctacttccacgtacaatgtttcaacttgaagacaactattcaagtatcatattaacattcaaatagcatcttastatgtggctctgggcaaatctttgtgcttcagtttactttaytgtagagtgaggataataataatggtatatacatctctggttattgcaaaaattgaatgaattaatatatgctaagttcctaggacagtgtctgacatatagtaagtgctatttttgtgttatctgttattattatcattattgttgttattaccattaggtcaaaatcctttactccaaaccttgagaccagctatattttgaaattcctattgttgggtttttcttaaaggcaatacagagatacactggtgatattatgtaatatccccaatggagcataaggcagaatcccataatcaagtatattaatatttatgcaaatatgtacagcaaattatatgtacaacaagttgaaatagataaagagcatagataccttctctatttcaggtcaggatttgacaaaaattaaacatatttttggttttcaaacactttggattttaaaactgcagataagggattgcaaatctgtgttgttactatttttgttcttattcttttttttttaaatcactgttagaatttactctcctattatttttttgtatggttctcagtttgccactatcttgcttaagctgaggttcccagagtggaacatgttattttgggtgtgacatgctggacgcagtaggattgatacatcagcctcttaatgttgatattaatgcttttgtggccagttcaccaattatgatttttaatcagcaaaaacgttctttctttcatctcatattttctcttattatttttrtgcaactggtctttggaaaaataagtttctccctgtgaaattgtttttccccatgaaatttaatttttcaggcttggcacattttcctagtctgatgagataattttggatcctgactctgtcatctcaatatctgctattaccgtgcatcagatacaactttgatcagcatgtcttaatacaatttggtgataaaaatattgaaaaggacagtaccaagggcagagttgacattgctcattagtaaacattagtcaacactatttggaatagccattcaactcattaaaatacatcagactgtatgacaattcatatttccgtccttgactctaactatcaaaaagatctttgtctgaggtcttgttaaaatccatatttgatctatctacagaaatcccatgacatgtactgcaatagccctaatgaagaaagaaataaggaggctctcacctaatttagtctttaaaaacccatgtttcctctttctgtttgctttctctctttcaaagtcatcacaaaaatctgtttgataatctgttcctcagattatcaagaagattattgaaaacaataaaacatgcagtactcttggcatgttgatatatgttaaagatgactacataatttgtcattcaaataaagatagttttattttatataatttaatattatattttatataatttcaacttttatttttgattcagggagtacaagtgcatgtttaggtatatcgcatgatgctaaggttttgtgatgtaaatgatcctatcacttagttagtgagtatggtacctaatagatttttgcgtcttccgccctccttctttccytcttctagtagtccccagtgtctgttgttctcatcttaatgtccatgtgtacccaatgcttagttctcacttatgagtgagaacatgcagtatgtggttttctgttcctgcattaattttcttaggataatggcctctagctgcatccacagtgctgcaaaggacatgacttcattcttttttatggctgcatagtattctatggtgaatacgtattaggttttctttacccagtccattgtcgataggcacccaggttgattccatgtctttgctattgcaaatagtgttgcaatgcacatacaagcacatgtgtctttttggtagaatgatttatgttcctttggtatctkcccagtaatggaatttctgggttgattggtagctctgttgtaacttctttgagaaatctccagactgctttccacagtgactgaactaatttacattcccaccaacagtgtattttctccacagccttaccaacatctgttatttttaacttttaaataatagccattctgactggtgtgagatggtatctcatgtagttttgatttgcatttatctgatgattaatgatgttgagcatttttccatgttttttggctgcttttgtgttttaagaagtgtctatttatatcttttgcccactgtttagtggagttattggtttttacaattgtcttgctgaattgtttaagttccttatagattctggatattagaactttgttggatgcatagtttgcaaatattttctcccattctgtagtttgcagtttgatagtttcttttgctgtgcagagggtctttagttgaattaggtcctagttattgattgttatttttattgcagttgcctttgaggacttactcatattttttttcccaaggccaatgaccagaattgtatttcctaagttttcttctaggattcttatagtttgaggtcttatatttaactttttaatctatcttcaatwatttgttgtatatagtgaaaggtaggggtccagtttcattcttccacatatggctagccagttatcccaggaccatatattgaacagggagccttttttccattgcttatttttgtcaactttgttgaagattggatgactttatttctgggtttcctattctgttacattagtctatgtgtctgtttttataccagtaccatgttgtttttgtttctttagccttaaagtatagtttgaaattgaataatgcaatgcccctggctttgttctttttgcttagtattgctttgagtatttgggctcttttttggttccatatgaattttagaatagtttttcgaactctatgagarataacattgataatttgataggaatagcattgaatctgtagattgctttgggcagtatgaccattttaacaatattgattcttctaatccatgagcatggaatgttttttgttttgtttgtgtcatctctgatttctttcagcagtgtcttgtagtccctttagagatatttcacctcctaggttaaatatattcctagatttgtgtgtatgtgtggctattgtaaatgggatcatgttcttgatttggctctcagcttgagcattattggtgtatagaaatgctactgatttctccacgttgattttgtatccggacactttactaaagtcatttatcagaataggagccttttggtggagtctgagatggttttctaggtatagaataatattgtcagtgaagagagataatttgatgatgtattttcctatttggatgcctttgatttctttttcttgcctggttgctctgactaggaattccagtactatgttgaataggagtggtgggagcaggcatccttgtcttgttcctgttctaagtggggatgtatccagcttttgcctgttcagtatgatgttggctgtgagtttgtcatagatggctcttattattttgagatatgttcttttgatgcctagtttgttgaaagcttttatcatgaagggttgttagattttatcaaaagctttttctgcatctattgaaatgattacatgtggttttaaaaagttctgtttctgtggtgaatcgcatttattgatttgcatatgttgaaccaggcttgcatcttggaaatgaagcctacttaatcatggtgaattaactttttgatgtgctgctggattcagtttgctagtattttgttgaggatttttcaatctatgttcatcagggatattggcctgtagttttcttttttctttgtgtctttgccagcttttggtatccgggttatgctagcttcataaaatgagttagaggggagtccctcctcctccattttttggaatagcgtcagtaggattggtaccagttcttctttgtctatctggtggaatttggccatgaatccatctgccgtagggcttttgtttgttggtattactgattcaactttggaacttgatattggtctgctcagtgcttaaaatcttttaaaatggaaaggaggtctattaatagctatgccagaaaggcaggcataagctaggaatatctcagacaaatgaggacatgtggtcgcccataagtgaacatggctgagagtctctaattccttcagagtgagaaaatgcattttacaatatccctgtctgtccagcttcgtgcctggcttcatgccagtattgacaccaacattctttaattgacagttgtcctctattacagaaaataatgagaagtagagcaacaccccatccatcaacactaaacatttcataatccatttcctctgtgatgaacggaagctccttggctttacgactcttgttgtactggatggcactttaaaaagaaaaaaaaaatagaatatttttcttgctgtctatacattttcaagccttagcttattatgtttttgagctttcctgactctaagtttaggaacattctcctctgtactatttgtccttctatgatttgcacaaatcctcatgaaatttgaggtcatcagagattcctattgatctctttagatatgccttcctgcccccaccttttttgttttctgaattatttgcagaagaaaaattgaaatttctttctgaatagtctaataaacctcttgagccttcttccatttcagagtttcagccatggtttcatgctcccctttattaggacttttttttgaagcctcccttcctggcttctattcatctgattaaagctaatgttcctttcactagctctgatgaggcttaagatgtcatagacacttttttcctatggtttctttcattttcacactcccaatctacttggtggccagacttaatttgaaaaattgcagtttttatcattgcttattctgttatcttcagcataatttatacatttctattaagagatccctttgcagtcttattttcctttaagcttcccaatccctggagaaaataaaaaacaaaacaaaacaaacttgaagaacctgttacaaaatgtaaatttagagcaatttggaaaatcttaaggtatttattataaaattaaaactgagcaaagtaggaatgtagtcatggtattttaacagttaataacaatacctttttagtcatgtatcaaatcatatgctttgcacacacagttatagaatcattaaatatgagacaagacagaaatcaagccactgtgaagacatgggaactttctcatattaaagtggcatattgatttgaaacaagttgttagggagcttttttacttccatctctatgagtggattttaaatctgctctcttgggaggaagagtatggcagtcacacttctgatgcttgtatatttccaattcctcttcctactcaaagaaggaggcatgacgaaccccctgagtgaggcacataaagtctccccacagcccatttgcgacagtgcagaggcactacaaggaagaactgacacttgggcttccattctcaggctcttcaggtgtttgttttcttgctcctcatgatcaccaatgaagccggggctattcatgctggctgacccccatcctgtaatgagtggagtcctgagggtcccagggctgggtttagaaagtgatttagaaggtacaatgtattctccttttggcctttaaatgttttacaagggtacacttagaaacctgagttttttaaaacatatgttttatattagaagatataaaaattcaaattcaataaagatcatttacaagaaaataaagagatttttttaagttttaatttgtgtaggtatattgtaggtatatatacttatggggtacatgagatgttttgatacaggcatgcagtgcataataatcacatcatgggaaatgatgtatccatccgttcaagtgtttatgtttacactttgtgttacaaacaatccgattacactcttttagtaaaatgttagtaaaatgtaaattaagtcattgttgactatagtcaccctgttgtgctatcaaatactatgtcttattcattctttctaactatttttttaacccattaaccatccccacctcctctccatgccatctctcttactacccttcccagtctctggtaaccttctattctctatctcaatgagttcagtcgaaaaacctgatttgttttgacagttgatactgacccttatacatttatactttactggacagaaactaggaagtgattggtgtgaaatataatttgggcagaaaagttcaccttggactttcccaaaaaatatttaaaggtagtgctcgttataagaatgacagtttcatatacttttgttaattccctcttggaactttaaccagaagttttggcagcctgattagtcaggggtattttctgagaaaagaataattaaggacggataattgcactaaaagtaattaaaatattattcagccatactgattttaatattgtagtagacttatattactagccagggaaatcagtagacttcaataaaaagtgtagacatgtatccaaacacctgtaatcatttagtatataatagaagtggcatataaaattagtgagacacaatatgttttattcaaaatatagtgttggcacaaatttggagaaaattaaacttagatttatttgtatcatagtctctaaaataatgttcgtagatattagggagttaaataatccctagcatttattatttattatgtgccagatattatgccttgcactttatatagattatccagtttactacttttaactgctctgtgaggcaaatactagtactacttattagttttatgataaagaaattaaagcacagatcagattaatcatagatcagtggaggcagaatagatcataagattaaggtcagtgttaggaatggcttccagtccccacgcttttaaacaatgctcgttaaaagaactaaatggaactactgctgaatatgtatatgtagttgcakcacagagatctttcaaaacttgtcaccaaaaacaaaagccatgaaggaaaaaatttagctacataaaaactaaaggcctcccctcttgaagaaaataccttaaatgaaataagacaaatcaatgatattttaaatgtatatgacagaggatggattaatatatttaatgtaaagaggtcttttaaaaagcttaatactctaggaaaaaaatggacagtaacatgaaaccaatatacaaaagaagtgtaaatggcccaaaacatgaaaaatgattagtcttactagcacacaaataaatgcaaacaaaatcaaggatatcaatccacacttttatttgaaatagtggaaatacaaagacctaagtttttaactttagagaattgatgaaaagcagtagaatttaatgcagtctttaatgttttaagaataaaatgaaatggcaaagcacacaatgtattgccaagtaaaaagaaaggaaaagggtctcacttttatttataaacaaggcacagatctgcatatgaattaaatactagtatgtagtgcaccaaattgttaacagtgatcagttctaagtggaaggcttattatggttgaatatttctctctctctttaaaaaatctttcacttctgttttccaaatattctaaatggacgtatcatatttgtatttaggaaaaaaatatgtatgtatagtgaagtaaacactcaaatctaaagccactccagagcatcacttcccttttctagttatttttagtttacaaagctcaatcacgtacacattattatttaacagaaatgccaccacaggtaggttccccctgccacttgtaatagcttgattttctatttcacaattttggagattgtaggagatcggtcagggtggtgggaaaaattatagaaagatggaaacattcctggaaggctgggaggttttgcagaagctttgggaaaggattgggctgaaggcagctgaattctctaagagtagataacaaggaagtgtaagagaattgatcaaggtaagttagtttacttaggcctctgaacctgggggcggggcggggggcggggcgcaaccatattaattacctacaagtgtgttgcctcaaggcctttgtctttatatctgtactgaataaatgactgyagcggccgcttgtcaaggctgcggcctctgtgactctttacggcatcctccttgatgtctgtgagtggctcggtcccctagccgcgcggccaggcaaaacacctgtgtctgtgtacgttttttcatctgtcatttggccagggtctgctgggcgggcccggcagaagacgaagaggattttttttccaatctaatattgggatttctggtcttccttctttacataaagtatattcctccattccagttccttagagcacatacatcatccctggttccctggtgtaaaaagttgaagtattttgctccagttgatctrgaatgtggtcttcttataaastgttaacagataaacccaatgccacaggattcatcttggaccaggttgcagtattgagtggactgtggacatagataacaggtgatacatgtgcctcacatttatcatccccaaacttcttggattcgatgctctcttaggctccttccaagactgccagttttagatcctattctctgctcatccagtcctactcattggttccaatcactagttctgttctttgtaaatcattttgctttctccctcaagtataaggccaggccattttctttatcttctctttggtctctggagaagcatgactttattctttttggaatttgagttcaccaacatttagcttctgttcagaactgctttccatgactctgggagccataactcagctcatggctgatggactgttgttggaaatgtgtggcctcagcatatgttatgccatcaacttcactcagctgaatctcacctgttctttctgcctacttctctttatttatttttcctgtttccccttttgaactcatatgacttttaaaagctctagttccattaaattctttcccagcggctcaggccattccagccaacacatcatcagctgcaggctgttgtttcttctttaaaaattaatataaccgttagcatctctttacttaattttagtttgtcgtttccggctttagagaacacaaatctataatgaggattagggaggagytccccctatgcatacacaggccacaggccttctttcctgcacgctttaaatcactcagcggaggctcctcctctgtgggttttccccactcaytccacccccaccacartagctcactaattaaacaactgaattcaaaggttcaagtacattcccagcatacacactatgtcattaggtttaygcaaacaaagtagttttactgaatttatacttttgacctgttatgtttaggcaaacactttcttcytaaagcctgcagactctggagttcagaagttctgaaattcacagaagctgagagtgatagaagcttggaactattatacatgccctctgatttcaaagtttatgttcctaaagcattgattgccctaataattagtaaacgttagaaatttatatttggtttactaatgctgtgtaattgttatcttgtttgtaaattggaattgtntgtgacttttttkggggggggttgtttttactgctaagaaaatatgtcagtgtccactgctctattaggttggtacaagagtatttgcggttttcaccacaattaaaaaccacaattacttttgcaccaatgtaatatttaatgtcaagcaagtaacttaagctcatttttcctttctaaaaggttatttttgtgtgtacaggcacaacctgacttgatctctgtgattccatattaatttccctatgccttattttcctcacctaaaaaaatgaagacagtrcctcatggatttctcttgaagaataaataatagaaaccattgtagcactcagtaaatatraattgctgtacgaacattactaaatcacagccattgtgctgtctacataagcacttttcatttgggttccttgctaatgcattaatctgttgccagaggtaagaccctgcaaccgatgtcagaagtggatgaatttgtttccctgaatatgcctagcttttaaaggctatgcttactgatgagaggcataactttttattattattattattaatgataaacacagctactctgtgaacacaagcatctccaacatgcagaaataacccctctctgtcccaactgttaactctgatcttcttttagtggctgtggttctgtttggtaggtcttttgtttttttatttttttatttttgagacagagtcttgctttgtcatctaggctagagtgcagtggcacaatctcggctcactgcagcttccgcctcccaggttcaagcgattctcctgcctcagcctcctgagcagctgggattacaggcacgtgccaccaaacctggctaatttttgtatttttagtagaaaccatgttggtcaggttggtctcgatctcctgaccttgcgatccgcccgccttggcctcccaaagtgctaggtttacaggagtgagccactgtgcctggcctgtttggtaggtcttgcttccaraataacatgaggaggagtggaaactgttagctctctcaccaattcaaatgccaataagatgccccaggccgtcaaggctggcttttgcctaagcccctccttcacatttctcactgttttgactaccagaaggaaaggatgtgtggggcacagtcagcaagttactctagttatcttaccccaatctccaaatccccagarctctggcatttaatgccccttggaattattttattgttattatttctagtctataatttgtaaccccactcttcccctccccaacaaatggaaagccaatactaaaagttcagtggacagttccctgaatttgatgattggtaggcaatttaagataaattttattatttatgttacattaccagctatgaagaaagggttgagtagaatatctatttctctcaataggagaaagtgcaaagattagcccattttctgtgtgtttctataaatataggtaccctgraatgtgattttaatgctrtatytttcccttgtgtcatgctttggaaatgtatctaccttgggagtcagttaaaycacatgtggatgttttaaataatccttgtgattaagcaagtaaaatatcttctttagatttggaccagctattttgtttccatcataattttggacattatttgataaattaaaacaataatactgattcagatgcctaatatgtttgtaatgagatatccaagaaaatgtcatctcatgtgtttatttctagatagtatccatcagagataagcatggtttaagatgaatgaccagtagttgagaccaagaaggatgatttattagtccgttttaacactgctataaagatactgagactgagagagagagacagcaacagagagagagagagagagagaaagaccataatgcaatcacctcccatcagatctctccctcaacacatggggatgataattcgagatgagatttaggtggggatacagagtcaaactatatcagatgaaatgttttaaattttccattatatttaaaaagattatgggatgcaactgggatctcataggataagtggatagagaagatggtggtatggaactcaaccagatgatctgatacagtgggttctgaatattacattgaaaacatgagtgaatgatagactggcaaagraatatgaagagctaaggatattattattgtctttatgacaatataaaagttatgaaaagcacctttacgcagaatcaatcacattttcttcctgaaaaataaaagcaatgttgtaccatccattttatgtatgttctttttttacttttctggccaaattttctcagttctgtttctttgggtcacttcttgcatttgccagagacatttcctccagtcaatgattatttgcattrgttccctgtggctcttcctgaattttttcaatggcatagtaatttttttcttgaayrtttcctactgctttaattttcactcctgttttaaattcttcattaattaagctttcccaaggcttaaatacctataaaactttttaaaacttaatcatttgatttgcctgctcagcttccctagtcttacctggttttaagactgttaaacctaaaattgtgcctgggagatggtgtgatcacagaagggaaaagaaatgatgacattgttattgaaagtttaatgatgagtttcactggaaaaatctcccacttcagtgttctttgtgtttcatgctgataagccgctaataattttaaatgccttcattttagatttaatttattaaaaacacttatagttttcaagtccacataaatactgggtacaattcattcgggctagaagaaaatgaaccttacattgtcctttgcaaatgttgtcgcttacctcagcaaggctctttgattttaattctgtagaccataagcctgccataatttttctgattaagaatttggaactagaggttgaccttaaggataaagtatcacatttttcttcaatttgaagataaagaaatgaaagcccagagaggttaagtttgcagagcaggatactagcagagccagagcagaacccagggatttgaatgctctgaggtttgttcacacacaagtcaccaggggcgatcagtataaccataagccagaaagaccatgagttggtctgaaaaatcacacttrtcacctcacctaattcagggccagatgtagaagaataagaagaatgtacctgaatctgcttaggggtctagttatttctataaatgggtatatagagagttcacttgaattctaatggatgacatttcctcttgactctagggaaagctgtaactgtcttatgatcccacgatatggactctaggactatgcttttgtgactttcaaatccagcagttgtttatagtttgtgttataagatctcctgccaattattaaaggtatcttttctattatttgaaatagccttgtgttcaattgtatcctcttcttccccacaatgcatattrccaggataggctctgttactacttctgargatgataaatagaaatatagtttgctctttgatgagaaagaaaacaacactattgaactgaagtgcattaaaacaaatacccagagtattcatggrtattcttgttccagattaattgccctggactattatttttatttgagctttgtgatttttgaagtytccatatgtaacagaatcccttttttgttgtaagccatagaagcagctgaaaactgaaccactttgataaagtaagygtattttctgtaaaggtttatgtgctttcagaaactaattcttgtctatacaatcaatgtaattttcttcttatttctgttgtagttaccttatttaatataatttgagacaaaatcagttattttaatgcaaaaaggaaagggttttatcttcttattaacaaggccacttatttggccatttctgtgaaataaatggtttgaatgaatccccctaattgaatattgaattgcctgttttagtaaggatcaccctctccttgccttttttttttttttttggagacaggatctcactctgtcacccaggatggagtgcagtggcaatcgtagctcactgcagcctcaaactcctgggatcaagtgatcctccacctcagcctccctaatagttgggactacaggcatgtaccaacacaccttgctatttaaaaaatgtttctgtagacatgtattctcactatcttgcctggctggttttggccatttttgaactcttttgattctcacacgttttatagagttttccctaaagtgcatagctctttattccttagggggatcttaaaatagggagatccctattttattgtgatgaggtcagtgttcctgtgactaatcactgagttacatatgtcactgaggaaaactgttcctctaagctacagagattcctgacattgggaaggagacatatagagttagccttaagcctgttagaataaagagtgtaagccttctgtattggtcagggttctttagagtgatgtaactaataggatatatatacatatataaaggggagtttattaaggaattaactcacacaatcaaaggtcccacaataggctgtctgcaagttgagaagcaaggaagccagtttgagccccaaagctgaagaacttggagtctcatgttcgagggcaggaagcatccagcatgggagaaagatgtaggattggaggctaagccagtctagtcttttcacatttttctgcctgctttatattctggccatgctggcagctgattagatggtgcccaccagatgatttctttgtcaccctctttgtcacccagatgaaggtaggtctgcctttcccagtccacttactcaaatgttagtctcctttggcaacaccctcacagacacacccagtatcaatatgttgcatccttcaatccaatcaagttgacactcagtattaatcattgtaagtctacsccttgtcgacttgaacccatacgcatctgagatcacacattatcttcaaataaagacaataataaggtcataattacacgtaacataatgcagctatccttcgtacaaccagaaatgcaccaatccccaacccaaatgctattacataaagctaacgatacttaaacgctaatatgaagtaaatctgatgtcacatgttaaaagaaaaaggaaataaaatgaacatatttccttagtacaggtgtatacatacacaaacatggttttaccaaaagaaggaggaaatactcatgacaattacagtcctcgtttctgcaactggtcacatggtcgtagctggtattgatgactaccttctacccattctgtattccctttgccttcagcaagcaccccagcaggtcatggttttttcctggtggagtcacccaaaccttcattcctgaagggtcttggccatttgtagtcctgcctggattgggctgttgtagtttcccattgacctgaatcacagggcatggtaatactaagagaygccgcaattgatctactgtattccatgcatactcttctttaccttcattgtggagcagtagactgatttcatcttgatagtctgggtcagtcaccccagctaacactgtaactcccttcttagcctgttgacttaaaggtaggaggagcccaaagtgtccaggtggcaatcttaacatccagtttaatggaaytattgttgtgtttcctggtggcagcattcctccctctggaactaagacctctaggcgagcagaacataatgtcgcggtaccaggaagcaaaaattttgctggtggatcactaagggtgatggtgagtgctgccacttcracttccaccccttgattcctggaccagtgaatcttggctatgggagaaacagtaccatatataggacgccgattcagagcatacacagccttccagaggactttgccccagccctgcaaagtattgtcacctagttggcattttarttgtgacttcaaaaggccattctgccattctgtcaatccagctgcttcaggatgatggggaacatggtaagaccagtgaattccatgagcatgagcccactgccacacttctttggccacaaagtgagtgccttggtcagaggcaatgctgtgtgggataccatgacagtggaccrggcattctgtgagtccatggatggtagtcttggcagaagcattgtgtgcaggacaggcaaactcatatctggagtacatgtctattccagtgaggacaaacctctgccctttccgtgatggaacaggtccaatataatcaacctgccaccaggtagatggctgatcacctcaaggaatggtgccatattgagggctcagcatcagtctctgcttctggcaaatygggcactcagcagtggctgtagctaggtcagccttggtgagtggaagtccatgttgctgagcccatgcgtaacctccatccctgccacaatggccactttgtttatgggcccattgggtgatgacgggggtggctggggaaagaggctgagtggtatccattgaatgggttatcctgtcyacttgattattaaaatcctcctctgctgaagtcacctgttggtgagcgctcacttggkatacaaatatcttcagagtttttgaccactcagagaggtctattcacataactcttccccaaatttctttgttgccaattttccaatcatgcttcttccaagtccctgaccatccagccaaaccactggctacagcccatcaatcagtatataatcacacatctkgccatttctccttccatgcaaagtgcacatccagatgcactgcttgaagttctgcccacaggggaagatttcccttcactgctgtccttcagggatatcctagaaaggggctataatgctacagctgtcctcttttgggtggtgcctgcatattgtgcagaaccatctgtgaacgaggccctggtcttctcttcctctgtcaactgattatagggaactccccatgaggccattggtgcaggctgggtgagagaaggcagggtggcaggactggggaccatgggcatttgagccatttcctcatataacttcaggacctgctcaaacccaatcacatatatactacttccatttgatgrtggaatgctgtggacatgacccactttgtgagtaggtgggtcagaaagcacccagttcatgataggcagttcaagtgataggcagacgtggtgacttgatgacccatagtcaaatattcagtttccaccaaagcccagtaaygggacaagagctatctctcaaaaggagagtagttatctgcaggagatggcagagccttgttccaaaatcctagaggcctctgctgtgattcacctgtgggagcctgccaaargctccaaatacaatcygtatcttctcctgatacctcaggcaccattggatctcctgggtcatatggcccaagtggcagagcagcttgcacagcagcctgtacctgttgcagagccttctcctgttctggacaccactcaaaactggcagccttttgggtcactcgataaatgggccaaagtaacacatccaactgaggaatgtattgcctccaaatcaaataggcccattaggcgctgtgcctytttcttggttgtaggaggggccaaatgcagcaacttatccttcaccttagaaggaatgtctctactgactccactccaggtaccaaaatctgtattagtcaaggttctctggagggacagaactaataggatagatatatatataaaagacagttkattaaagagtattaactcacacaatcacaatgtccctcaacaggctctctgcaagctgagaagcaaggaagccagtctgagtcccaaagctgaagaacttggagtcygatatttgaggacaggaagcatccagcatgggagaaagatgtaggctgggaggctaagccagtctagtcttttcatgtttttctgcctgctttatattctggctgtgctggcagctgattagatggtggccacccatattaagggtgggtctgcctttcacagcccactgattcaatgttaatctcctttggcaacaccctcacagacccacccagagtcaataccttgcatccttcaatccaatcaagttgacactcggtattaaccatcataccctcttaagtggatctccctcctttgtctctgttatcacatttataatagataattcacatttgggatccacattttttagacatagattaagatagtgtgatgtacttgactaagaaatgcaccaagctaacatagcttctaaaagtgagtctatgatcatgagactktcttctcacagccatttcgtaaatgactggcaaatgaagtctccaaattatatcatcactgtagrgatgccacagaagtaaagataactactccagtaaatatggtgggaatatggtgtttccctatattcttcatctaaggattatattgctctaataaataggtcttaatatcagtgtcgttcagcatttgttcatttaaagatatttaaatcatagtamatttttctgtttgagtttgtgtgtatgtttcagataatggagtttctagatatgcaacttgttggtatctatcagcaaatgtcatccctgatccaaaagcataaatgcatccagtcatctgagaaattagccagatttgccttttggttttgaatctcagctaatgaatctgtcctgttagwcagttctattgttcttacccttctctttagagctgtgacagacactgcacaaagaaaactrctacagaccacagaggaatcatgggtgttgtgattgaaaataattaattcaaacattgaacagatatttttgaacagcarctctgtgtacctggcactacattaggcataaaatactagagatagataaaatagaacaattgtcatttcttatgaaaatcagaaaatttttactaaaatgacaattttaatgaaaatcagacagatagggaggatagataataatcacattaaaaatcagtgatttctgtgaactatgataggtatataggggatggcttgagagagtgtaataaggactctttggtgacactgacaggataaaaargtctctctgaagtttgcaatgaggtcagatcaggtgggcagcaccttcctggcagagtaaacagcttgtgcaaaggtcccaaaacagaaaagcctatcggttttaaggaggtgaaatgaggtaggatcctggagaattgaatgtgagatggcacatatgatgcagctaaggagctagccagaatctaaattgttcattgttttggaagtgatagtaaaaactttggatttcttccaatgtacaatggcacaccattgaagaattttgattaaggtaattacatgattttgtttctagaaatttagtttgctatgaagaaaatgcattggargagaacaacatgggaaaagggtgagacattttacaagcagatgtttcggtgcatttgtgagataatggtgattcaacttarggtggtaacaaatgcagagagaaatgagtggacaaatttgaagtgtattttgaggcaaaactgaccacttggaaaatgtataaagagagagctttcaatgatggctccagattcttcatgtaagcaactctggatggtgtttccatatgctaagaggcaagtggtttggaatggaggagagggagcttgatagttcatttctgcattttttaatttgtgatggctatgaaatatctgagttggaatgtcaggggcgtagttgaatatatgaatctgaaatttgaagaagggaataggctgagttagatatttgactagaatttttcattgcaagcaataaaagccaaatatggcaaatttaactcgtaagatatatagatatataaatagatatatttatatatctatttatatctatctatatctatatctahctatctatctatctatctatctatctatctatctatyatcatctatttatgtagagagcaagatccccctaaatccttcacaataaatgtgcttatacatttgttgatttaggggggtcttgctgtgttgcataggctggccttaagctgtggggctcaagcaatcttcccacctcacttcctgagtagctgggactgcacgcatgcaccactgtgcttggctcctaaaggagatttattaaaagatactgtgaagtttgcagaccttccagcattacccactgggaacaaggccctagaatcaccccctaaaagtcatctgagaaagacaacattgctgccacccctgggcaaaatcatgatggctcaaagtaaatatagsaccagccctggccactgtatgcaggaaatgggacaaccatctctcttcctctggagagtgttgtttaatgaaatgcaacatgagagaacaattacagaagaataacaccaagagtattaccagctataaaaactgacaactgtagaatctttgctatgtgccaagtacaagattaagcactttacatggattatatmatttaatcactacaaaaagccaatggaggaaaataattgctatcctcattttattgatgaggaggtttaaaagtttatagataaatccagtgtgtggtgagccttggattcagacttacctaagcctgcagaatgccttctcttaagcatgtgggtggtatcacacagctgagaggccattgtgaggaagaactgataagcctctcytggtttggcaacatggacacaatttgtagcctttgaaatggaagtttcaatgctgagagagggaggaaattacagagggatgaaggatgaaggaagatgggttagtgagtggagatagtcttttaggtaacttttttgagacctttggctgaaaagaaaagtagaaagatacggtggtagctgaagaaggatcagggtatcaaaggaacttccttccttcctttcttccttccttccttctttccttccttccttccttccttccttccttccttccttccttctttccctccttctctcttccttttcttcttctctctcttccaccctgaagtcacttcttcctttaatcctaaagtaaaccaatctgcatttgaatgcagataggttaagtgttggcagggaagaagaggttaagaaagcagtaagacataataacttgtgaatagaggcccctgggcatgtggagggatgatgaccagagtgcagtgggattgacccttaatgtaacactttctctctacttcagctctagagacagagagggagggggtgagtaaaagaccttgaaaattcagttgtggaataaaagtaggggctatggtgtatgacttctattttccctggtaaaatatagggtaagwtcatcagctgaggcaaaaggcaaatggaaactgagatttagtaggaggtagaagaggggcactatttgttgagccsagtgagagagagccagatggctaagaaatctagtgagattcccaggcagtgttgaagtcttttgaatactaatgatcatgaagttgaagtactacttagtactaatcagacaagccatgttttatttctctttccctcaccagaaaaamattttaaacttgtartgtggtcactcaatgggttcttcctgttcactgcrtagacaaaattaatcaattgagatggtgctattgcagtatagagtttaaytgacatgagttcagcccatgtgggagaactggagctatcactcaacctccctaatagcttggaggctagggtttttatggactgtttggtgggcagggggctagggaattgatgctgttgattggttgggaataaaatcataggggtgtggaaaacagcctttgtgtgctgagtcttcctctgggtggrgccatggggccagttgagtcatgagtcacaagttttggtgggattcatctgaaaaagtactcaaaaaccaatcttaggttctacaataatgatgttatctataggagcaattggagaagtcagagatcttgtgacttctggccacatgactccagagcagtaagagattagagaaactatgcctacatctcagaagagttcaggttcctcccataatcctattcttgtggmcttttattagtctaacaaaggtggtttttggtccctgagcaaggaaagggttagttttaaggggagactagtatcgtcctagctttcaagttaaactataaactaaattccttcaaaagttagcttggcctatgcccgggaatgaccaaggacacctcagaggtcagaagtaagatggcgtcaacactgtcggacttctcttgctatcatgattttgcaaaggcagtttcaataacactggggagagtgtagagaatggactgtagactgaacagaactcagaacagggagacattagtatcctcacagagaataattcttccttttgggaaaatggttatctattatgaccttttctgagtgtggttccctggaccctggtcatggttgtcactgcagacaayatccagttatttgtcttgataatcarctrttaaactgaaataattcactgtgttgccagttgttctttccccactgtgggaattagaaagcatttggaaattggttatatcatataatacttgcactgtatatacagtcttccagaatagggaagatttaggcaacagtctggtaagtgaagtgcgagctatacacagaaaactagccaatgttttcatgagattttgattgaatagactaattttcaataggaggaaaaccatcctcttttgcagcatgacttctgtccttggggatgtatcatttctrtccatggaaaacactgccatatggtcacggcatcagacatatttaagccttgaaaattagatcttaaagcataaaagccaagggatgatgtgagttctcacactttgtctacattcctttcaaaaacccaaccaaattataatgaaagagggaatatttatsagtaaagtatgaggccgctgttgacatgaggcatttatgattcaaactttatgtttaaattygaaaatacgatatattttaatattaaacttcattccacaaataaagtttggactgattgattcacagttagcactgaaggacaaattttggaatcacaacatwgatccaagataccatctaatgtaagattcrccatcgactttagaagcatatttctgcaaaagacgaaactctacattaaatgtacatgatttccttttaaccaaacccactttttcatacatttattcaaatgattttatttgactagactcttctgtatcatgatcaaaagttcagtctaagcctttatcatatatatagtctgtgcattctgcacgaccttcggtgacccactgttgagtgactttccaaagcctgtgcttctgatcttgacctcttcacttgccttagctttgacagaatratgttgaagcatagggaagaataccaggttttgttggcatttcctattttgttgaattccyagttttaaattttccataatagaagtagatactgctggatattawacagtttttcttgaacatcagctggaagtttttgacagtaattgagttttagtctttaattaaacacagtggatctctggaacttctcgtagtttttaaaatcctatgatattccaggatatttgacaaattctgttgcttttaattatcctttygcatgcatattaggtgatttttaaatttaatagctatacatatacatggacatwtacmcacatataaatatacacaagggtttaattatatgtgtatatattctttcttaaaaattggaaaccacttgatgttggatttataacatgataatacacattttttttttttacctacagtgatcattgcttcaaactatatatatatatatatatatatatatatatatatttttttttttttttttttttttttttktgagacaagttctcactctgtcacccatgctggagtacagkggcacaatctcagctcactgaaacttctgccccatggggctcaagccatctttctacctcagcctcccaagtagctgggaccacaggcatgcttcaccatgcccagccatttttttgtattttggtararacgggtcttgccatgttgcccaggctggtctcaaattcctatgctcaaacartccaccctcctyaccctcccaacatgctgggattataggcttgagccactgcacctggcctgcttccaacattattactaacaatgatagttaacatttattaagcacttcctatgtgccaaacacaattgttggcactcattaatattaactcatgtaatccttacacttaccctattgtcacccccattttatggataagaaacaggagagaaagtaacttccccagaatcacctggctcttgagtggaagaactagatcggaagcttctgattccagcaagtgtgtttttgaccactagcaacactgcctcttaaaggaaatctgctttcttcaactctatctctatcgtatttggtgtaacaaccctttgcttgaatgttgtattacagcattattattattattgttattattattwttttttttagatggagtctcgctctgtcacccaggctggagggcagtggcatgatctcggctcactgcaagatctgcctcccaggttcacactattctcccgccttagcctcccaagtagctgggactacaggcgtccgccagcactcccggctaatgtttttggtatttttagtagagatggggtttcaccgtgttagccaggatggtcttgatctcctgaccttgtgatctgcccgcctcagcctcccaaagtgctgggattacaggcgtgaaccaccgcccctggcctacagtatcatcttttttgatgacattttaaatcacaattagaaataaaaatgtaaagtctaatgatgtgtggtgcttccagtgaaagtgacacagggatgagcatcaaataccttcagcacaaagccgagttgtgcaatgtgctcctcacaaccactgtaaaatatatactcattaagaaatgtttgtgtgtaggaaatgtgttctttagactaatgagatatagtaacaataatgaagagctaccatttattcagtgcttcctatgtggctgaccctttatgacagacgatgctagtgcctacccaatatctactcattttgtatggctgaatacagtctaatttactttgggatagcagtgtgcccacccaagttctagttagaggagctcccatgacagtcttgccaatgaggtgtaactggaagacaggaggttaaagtgtggagaagttttctttttttcagataaaaaagaacaattttgccacaagagacatgtgctttggatcctcatacctttgtgcctcagctgatgttgtctactctgcccattttacctttccaaatcccacccaccctccagtctctgctgcaagatcatgtagtggtgtagaaagaggcctgtggattagtggccatgggtaatttttttcactaaattaatgaatttttctaagctttatttttctcatcatgaaatagtaaaactccctacttgtcagggatgtgaggattaaatggaataatgtaagaaagcttctccatatggtagctggaacaaaacagtgaatagtttctcaaagaagctttctcatgtgctcagcagaaatgatcttgctctttctccccmaagggccactctgcaccatgcttactccatgtcacatactatttttttctttattttgattaatagtatttgtgtctttcttaccaaataaaggtaagcttcttgaagtcactgacrcttactcatagtgagtttctttttattggactaaaagtatgtgttattctagagcttaagccaacctaaatttatcccacagatttgcagactttttctttgttttgggttcagaacagtagatggtcagtttaaaagattttattgaatagtcacagaccattgcactggggacaaagagagcacrtaaatataggcaagagaaacttttaaaaagtaaagtattcycattgctaacagagctcttgaagaatatgattcaaaatgaaatataagctgatgttaactatgcaggcttttgtcagtgaccaaagtagtagtgtataaagcargtgattatgacattttatggtgcatttataccaattttctttaaaaagtgctaataatagtagaatatattgattcacactagataattaaacaccctcttggttagaggtaattcactttttaatgacatattaccgagcagtatgttctttcagttattttgggtttgatatggcaagaagggtagcaaaatataattcagakagggacgctcttctcatgagctttcccacctgtatacacctgaaataaagaaagtgaaatcaggagacagggagagagcagaaaggaagaaggaagattgggtaggagggggggaaggtccagaacaactactctagtttcagaaaatgacagggatggaaggaggggagtagacatacgttgtcaagaaatccaaccagacagctttactcctgatttcctctaggctcaaaaactgcagaaaatatatatgcacccaccctaatatatattctttgtccatactgacagagagagagattgrtaatataaatgcatacttttatacataaatcaatatataaatgcrtakttttatacataaatcaatatgcataggtattaaagtagttgatttcrtctcaaacatcaatctagctcattgatataattctagaaaataaactagctttgttttccctcagtttgaaatamtattttatccttagttattctagtttattstcataaaacactccacctccctctctcccacaygtggcatatggtatccaatgacaatcataaatatcttgacctctccttcttaacrcctcatgaactagaactccagccattaattgcactaaaggctatcataggttctgattaattatattgatatgttataaaattcttaaaacattctcttttwtctttatgtataaaatggactcttttgatgagttaggctctaagtgagactattggaaagatttcatatctcacattccttcgattgccctattatggtctgtgtgttctggttatgtgttaagagttttctgacatttgaaatcacagacccatttgaaccacatggagtgcttttatttcaaaggaattcagccttaaatacagatgggcttgtctgcatggtctagatgacatttttataacctgtaatgttcttcagcaagatgtggyaaatgattcttcacatcatccaactagagagtgcttagttgttagtctcattcacaccacagcttctgagtctgctgaacacaaaattattactgccagaactggctartgaaaatccaggtattgctacattattcatttaatcgtgatcagtattaatcccaatattgttgtcccctattttaatctttgtcatgctactttagtttagtgtaatttcactttttgctttttgaaacaatacccttcctaggcttgcagggaagaaatgtcctaactttgcctcttcttgcttggctgtgactccagaatgagctagtcctgctggagactggcttccagcactgttatgacccctactaatgtaatgagactgaaaattaagaaaactatcagaaaggtacaaagaagccgagagataagcctatggaattgtcttcatgtcccttctatttgcccctttgcactctcaaataactccccctttgggcctttggaccccacactgctggaaataaatttaataaatrgttgttaagcatctgctttgggtaaggcactatgccaggggatgggaggatacatccttacctcttacratttgtgacctcatatgtactatgtggtcagtagatgcacttccatgcaaaataaaatagatgccctaaagagagatgcaagcaaagtgttaaagttacttccgaatggcaggaaaagagcatgccaaggaagtggcatctggacaagcacttgaaagaagattcagagtttcatagcagaagaaaagacagatacgcattttargttgtttgaagtgcttgagcaattttgggagagtggatgtccctggggaagccagcgtgtagctccagtggaccacgtggctagagtagattgtgtggtgagattcagtggcacgtgaggtggaaaatgcagtgaggttgaagtagagtacagaagtggcagkggggtgcccagaaggccagtgaaactgggcccacagtcaaaggaaagatacatgggacaacttacagaaattacttggtgaagaacctggtatagtatattcagggaragaatgagtggctccagggtgtctagactgggatgtttctgacttgttctgtagygccctaccttctataaatacacytaagaagcaagatagactaagttacatcrcaggcgaatgttatcttaggtacatcctagtgatttatacttgacaattgctttttatcctgctggccctctctatggtactccattccattctctagtgacttctggctgacctacaatacatgtccacccagcatccccttccagtactctaggctgcctttctaaataaacctacttgtctatatgccccawcccatcagaatcctgcattgagttatttaacagataaagttgtctgtgctaatatatgaacaaattagtgggttaacttcccaaagcaataattmttttgcattttacacataatcttgtggttaatccaaatagttatgctaatagtgggaatttctctgccttgtgccagagcagtaggaaggtatctggaggcttctatgtcatacaagatgctccccttctttttgtggatagagttggctctttctagaaacacaatgagggaaagaagaagtgttattaaaattaatcagtggtacttaggcaacccagtttacaaaactaaacaaaaaatatattttagcacctgataaaagtttattttaaaaatataaatgtattatttaaaaaaatcatatcacacccatgttacagaaaagtgtggtatataatgcttttatttatttatttattttcgaaatataccttcatcatggaaaagtgtcagtttaaacaaacttcaggagataggaggaatgggaaattaatattatcactactaaaaatgacccatttttatgaagatttttcatttatttcacaggtgatctcgtatatatttgtatcatctaccttcaggggaataattgttcatgttgggtacttctaaaatacagaaatcatgatcccttctgctgaaatgcagctaccttaggggcagatggtaatgattactcgaaaggccacagactgctgtaaatagattaagcatagaagggacacagattatgagagacttcaagggacttcgaggtagcaagaacataattactcaaattaaatttggcctacacaacaggctaatgcttcttttctagccacatgtttcagggagacattaatgttctacactgtaatattttgtgcaaggagaaataagtatctttcaacagagcaacgatgtctaagccatttttgtatttgctttttggtggtttgttatctggaaatatccagaaccattatttatttatttatttaacttcttttttttaaattacagtaaaatatacataacagaatatgtcattttaattatttttgagtttcgtgatgtgaagtgcattcaccttgttgaacaaccatcactactactcatctccagaacaagagtccttatttttgttccttagtcatttttatttatatgattctgtacagttaaagcaatatggttttcttttattttctttttttgcttatcatatccttccctcgcacccaaattgtatgactatttcaaaaatagatttytggtgtcatgactccttcgagctttgaattaattattctctcctggataatgcattttcacatgcatgctagcatatttaattggatattggccctcagataatagttttcttttgttgatatacaatcaatgaacttgacaatgggccaataaagtgttatttttttcctcctctccaatgagataatttgatcatttgttcttataaggtaacattacaaattatccttaaatgtggcrtagctattttaataacatcattgctattgagatgatgaagaactttagaaatccatgcaacaaaagttaaataaaatgaaaaaagaacctaaataaatataaataagttgtatattattgaaagataaaatgtcacaaggcatccagtttattaaaggcactttcaattactgtgcttttgttatttttataaaaattcctattttgtgtttgaatttagttagggtataagaacaaattaactaatgagataacctacagacttagatgaattcctacaagctttcagatgacagaaaaaaaaactagaagtatggtctctgattttgtttttccttcagataaaagggggttgcagaatcttcttttgtatcgttggtatccatggattctgcatctgtagattcaaaaaaccatggatggaaaatattttttaaaaaattgcatttgtattgaacatgtacagacttttttattgtcattattacctatacaatacagtggaacagctatttacataatatttaccttgtattaggtataagtaatttagagttaatttaaartatacaggaggatgtacataggttatatgccattttatatygggaacttgagtgtccttggattttggtatccatgggaggyctagaaaccaagcctctctggaccccagggaataactttacatattatatacactattctcctatgctgttctcataatttaaaaatacaaaatatgtattttatataagtttctgagagatttttagtcataaaggtaaatgcatctataaacttcagaaatcccaattccaaaaggcatttaaatcagaatgcataaagcatttagcaatttcaaaggaagaaaaatatagcttcataaaaattctaaagaatatttttattttcttttcagacattttggaatgtgtaaaacatccccttatgaattgaaaaaatacatatatgtgaaatgccagccccatttacctgtaatatcaactttctagtacaagaatgtttgtggttttagtggtgaatttatgatgtgtaaatgcttgtgtgtatttaggaaatctaatattgtttgaataaagtggtaaatttattatctcataaattaatggttgagctgaatcacattatagtcctttaacaaktgtgtctgtgatctgagtagcagtcagcacaaagcaagggatcaggtttcctctcccaagtaagataaagaacaggtatgccacctgtgttatgcatttggatagggaattttgcctactgatgctaattccagtaatgtaccagagttcttagggagaggtagttcaaaaatatgagactcataacagaaattaaaaaaaaactcctcagagcatgtggtgtaaaaattatatttctgaaagaatacattttgtgatgtacccaaattttaattttattctcaggaacaaataactgcattaaaactctataaagttaggcctcaacagaaggcaacaatactcaaagtaaagggtcgtatgagtttaatgttcttaattaatatatatttttagagttagttggattcagttgataaatttttcaattagccaaatatagtgggaaatacagaaagttgatattagtcaccaatatgagcataaatagctataaggcattaactcttttcaaacgggaattcatgttgaagaaaatgraatgtcaacttgtttattttttatactcttgatcaaatcaatgggcaaggaaagataaaattagctttttgaattaattagttattgggctgaacaaaattattgacttattctactttcatagacatggcactgagggagggagactaacaattattgacaacatatagcacttttgtaaatgtttagtcatttaattctccagcccagtctatgatgtgggtgactttcacccccgtaagaggagggaacaygcacagggatggtgtctcaggatctcacagtgatggcaggtttgagtctaaagcctctgctctttctactgctagacccttctctctttggatggttgtctagtcatgaccctcatggagattatttaacatttcatcattaaaagtaaacattaacatcactgctttggagataaaatcactaaaatctcaggtattgtcttaagtaaaggctagacttatatttcyatatactcataacrtctgcaaataaggacccaataatcatttgataatattagtaatcatttcagtggagatgatgaaaatgtacaatctccctgaaaggtgggrggaggaaggaaggcaggaaggccagggggagaaggtaggcaggtgtgtttctaggtgtgttggaggactgggctatgttagaaagcgctctggtacaccaattttgagcttgcagccagtagaaaatatgagcaaaccccagatactataggggtttaagataacattgagattgaatagtctagagctaagttttgaaatgcaaaggaaacaaggaaagtgagaaaccaagtttcacttgcctgtggggtcaggaaacccattcagttgatgaatgagaaggggaaataaggcaaagcccagagaaattcacaaggtggggtcagatcttccccaggacttattttatgtggcactgcaggacttcaatatgagaatgctaggggcacttaacaagacagctgataatggcctgggatagaactgactttttatttttgcagatacatctaaaagccactttaaaacacttctaatcaatcttaattccttcactttttaattcagtgtgtttccatataaaagaactttaaaatggcaataggatatttcctctaatgatcatgaataataacctccttctccttttaaatgaagccaagaaatttattcctaatttaaactaaattctatgtagtttatcttctgtaaaagataactaatrtactaataaaatctataaaattacattgaaagcatagctgttttaagataaaataggcattttttcatrtacttgtgatatactaaaaatatgagaaatagagtgttctctcttaattagcattaaaactaaatggaattaattataaaatagggacttaaattctttcaatttttacattctatatgtaccaaatagttatttatatggtacatataatatttatatggtacatataaatagattaatatgaacattctatatgtaccaaatagttatttagtgaaagaggttattttaacatacaaaaaattktatttttggacatggatttaattcctagtgcttttcaaaaaaacagatatgtttttaactatttaaaggtcttcaacatttaagattaaatgatataagaatatcagtgtcatgaaaactgtttcgatcatttgttttagcacaacaattgttttcattttaatcaaaaagattttgtcatccaagtgctccaagtagcttatatctatctatagacacagaccaagagcgaataacatcaagatcttcaggagcattgatgctagcgctcatcaattgttgaacacacacatttcctttttattttctggtactaacatcttttagatgaaactacatgaatattattagtgttcttctcagttcaagtytggccaacttgaactggactcactggtgaactgtaatttgttttttgtttgtttgtttgttttttacagaaccagggtaatggaactaggctcttccacatttcttctccactttatgrgggaaagcattgtggtcagcagattctgagagctacttctatctgctaaaatttgcatatattagccattgatacgatgtgtattgtttaccaaaatataacttttcttattttattcttccaggtcttccatatttcctatattcaaagcaaatatttttaatgtatttttaataaaaataaaatgattattacaggaaataaaataataaagaggaaaaattagattagtttacactttactaacaaaaataatctaattttggtgcttaactttaaaaaaacgtgtctctatatcatgctctcgctcctcctatcctctaccrtctgacaggccccagtgtgtgttgttcccccatgtctccataggtgcccatcattcagctcctacctataagtaagaacatgcagtatttgatattctgttcctgcattagtttgctgaggataatggcttccagctccatccatgtccctgcaagggacattatcttgttcctttttagggctgcatagtattccatggtgtatatgtaccacattttctttatccagtctmttattgatgggtacttaggttgattgcatgacttttttattgtgaatagtgttgcagtgaacatatgtgtgcaggtatctttgtaatagaataatttatattcctttgggtatatactgaataataggattgctgggtcaaatggtatttctggttttaaatctttgaggaattgccaaactgtcttccacagtgggtaaattaatttacattcccaccaacagtgtaaaagtgttcctrttcctccacaacctcacaagcatctgttgtttcttgactttttaatagtcgccattctgactggcatgaggtggtatctcattgtggttttgatttgcatttctctaatgatcagtgatgttgagctttctttcatatgtttgttggctgcacataggtcttttctttagaagtatctgtttctattctttgcccacttattaatggrcttgtttgtttttttcttataaatttgcttaagtttcttgtagattctggctatcagacctttgtcagatggatagattgcaaaaattttctcccattctgtgggttgtctgtttgytctgatgatagttttgtttgctgtgcagaagctctttagtataattagatccaatttgtcaatttttccttttgttgcaattgcttttgatgatttcatcacaaaatctttgcccatgcctatgtcctgaatggtattgcctagattttcttctagggatttatagttttgggttttacatttaagtctttaatccatcttgagttaatttttgtataaggtgtaaaaaagggatccagtttcaattttctgcatatggctagccagttctcccagcaccatttattaaatcgggagtccttctgccattgcttgtttttgtcaggtttgtcaaagataagatggttgtaaatgtgtggttttatttctgagtctctattcgttatattggtctacgtgcctgtttttgtaccagtaccgtgctatctggttactgtagccttgtagtatagtttgaagtcaggttgcatgatgcctccaggtttgttcctttttcttacgattgtcttgcctatgcgagtttttttttgtttttaatatcaattttaagatagtttttttctgattctgtgaagaatatcattggtagttkaatgggaatagcattgaatctataaattgctttgggcagtatggccatttttacgatattgattcttcctatccatgattatgaaatgagtttccgtttgtttgtgtcatctctgatttctttgggcagtggtttgtagttctccttgaagaggtccttcacttcccttgttagctatattcctaggtgttttattatttttgtggcagttgtgaaagggagttcatacatgatttggctcttggcttgcctgttggtgtatagaaatgcwagtgatttttgcacattgattttgtatcatgagactttgcagtagtggtttatcaacataagaatcttttagacagattatagggttttctatgctagatataggatcatgtcatctacaaacaaagataatttgacttcctctcttcctatttgaataccctttatttttttattttgcctgattgccctggctagaacttctaatactgtgttgagtaggaatggtaagagagggcatccttgtcttgtgccagctttcaaggggaatgctttcagcttttgcccattcaatatgatattggctgtgtgggtttgtagtctatggctcttattattttgaggcatgttccttcaataccyagtttattgagagtttttaacatgaaggatgttgaattttatcaaaggccttttctgcatccattgagataatcatatgatttttatctttagttctgtgtacatgatgaatcacatttgttgacttgtatatgttgaaccamccttgcatctcggggatgaagtctacttgatyrtcctggataaacttttgtgtgtgctgctggattcagtttgctagtattttgttgagcgtttttccattgatgttcatcaaggatattggcctgaagttttttgttgttgtatctctgctaggttttggtattaggaagatgctggcctcatttaacgacttagagaggaatccaaccttttcaattttttggaatagtgtcagtaggaatggtaccagcycttctttgtacctctggtagataccaattcagttgctaatatgtctggtcctggactttttgtggttggtagcctatttattactgcctcagtttcagacttgttattggtctagtcagggattcaatttcttcctggtcaataaaactttttattctctaaattttcctctgatgacagccttggtcacattctttaggtattttgatatattgttatctgttaaatagcactctatgattttaattttaattttttctttgactaattaattaaaataagtgcttagttttttgttctaaatctttggaggctattgtttttttyttatttggtgttgtgttaactttttaatttkttaaggcttttgttaagaatttcatgttttatcacataatggtcagagaatatgaactaagatttcaaaatcatgattgctagcatttcattttggcagaaaataatcatttttgtaaatgttttagatacatttgaaaagacaatatattaactaataattattgttttcatcagtttgrtaggccagcttctgaaaggattatgctaaagtcagactatgttttgctttttaattgacagcaattttaaaatatatttcactatgtcttttaatyatgctccacattgttatgcgtgcagtgtagaatagaaacacctcaaatcaccatagtaacatagacaattcacatytatcacagtggcctaatattcattgacagttcatgtaattacagaaaatcaggtccattataaataaattatctgctatctttttaagttaaatccataaattattgtcagagatgagtagatctctcctagtttgatattttttttatttctttagacacttaggcatctgttcctataaagtcctgtgtatttgattggctcactgtaattctgcaaacattaagaaaatattaattgttaaatgcattgaaagactataccttattcaaacaataaattattacaaaggcatgcataacccaagataaaagaacaatttgaaacttarcaagaagtgaaataatgactcaactgggaagaggtgactttctgcctgattttactctttaaaaagtgtacaaagtgaaaaaaaatgaattaagctttttgrcttaaaaatgtaatgcgattctaatcccacacmgttatagtttataaacyggaaataacagacagaaggttgactgatgtaaaatctaaaaatgtgcagaaaagctgctttagagaattgggtaaaggcaattctgtatgtgacctattttgtctgggttcattgacctccggggaggattcatattctccatgggcacaatagcaagcctaagtagcagtcagttaattcacagagttacacgaaagttaaagaattgttgtttagtatacctttcttttccatagttttagtgtggattttccccatttttttaatgtttgttatttgatttattatttctacctttcatttccttccctcactctttcattatcccttcctctccttttttcctcctcctccctcttctgctttttttycctctatttattggctgtttggcttatgacacatagttatcattgatccatgcaaagtgactttcatttatttagttagttatttaaaaatgtaatatgcatctatgaaaacactcttatgtccccaaaagctagtattttgacaaaaagctatatttaaacatgtatttaaattaccaacccattctcattcctcctgaataacyaacaacactcctttgccttttaaaatacatttgtcttgcatctttctcaaaatgaatgaaaaaattttaagtaattgttacacmtttataaaatgtattttgtatacttacttttttcatttaatatattgctgagatttatctatatttgtggccatctctgtagttcatccattttgactgcagtataatattccattgtatgaatttaccatataccatgattgatttgttcactatcctgtgggcatttagggcaattccagttgagctatacaaaactttcaagaaagatattattacaagtttactcaaacatttgcaggcaataggaaaagagggactaggctgggcacagtggctcacgcctgtaatcctagcactttgggaggctgaggtaggcggttcacgagatcaggagatcgagaccatcctggcaacacagtgaaaccctgtctctactaaaaatacaaaaattagctgggcatggtggcacaygcctgtaatcccagctactcaggaggctgaggcaggagaatctcttgaactacctgggaggtggaggtcgcagtgagctgagatcacgccactgcactccagcctgggcgacagagcgaggctgtgtctcgaacaaaaaaaaagaaaagaaaaagagggactactttcccatttattctttgaggtcagtataacctgatacccaaacaagaagaacattataagaaacaaaaattacagatccttctcactcataagtatgaatgtaaacattctaaacaaaacattagcagatcgaatccaatagtgaataaaaatgcaaattattgaaatcaagttgtgttcactccatgtttccataatgcaacatttagaaatatagaaatataattcattatggtaacagattaaaggaaaaaagattgctaacatttaaaatatattcataataaaaatattagttcatttagaatatgagggactttcttaaactgatgaaaagtgcacataaaaggcctaaatgaatatgatactaactggggaatatgggaggcattcttttaaagttaaaaaaaatgcaaaggtgttcactattgccacttcttattagcattgtactgaaggtcctagatagtacaataagaaaagaagaaaaaaatatttaagctacaagaactgttaagggagacataaaaatataaatatttgcagaaaacttgatgctttccatagaaataaaaaatctagagatcaattattaggtataataaaagaatttgcaacggtttctgaaacatgaaactactgacattttggataatttactgctgtargacactgtcctgtgccttgtgggatgtttagtagcatctttgacctcttccactagttgccaataacatcaccttcccagttgggattatcaaaaatatctccagacattgtgccaaatatcctgtgagggacaaaatcacctcaaccactgagctagctataagactgatacagaaaaagttagctgcattttgtatactaacagcaaagtaatagataatgtagtttaagaaacattaacaatagtatcagataatattatctaggaataaatgtacaaaaatggttaggtgctatgaaaagaaaattatataactgttttaagacttataagagaaggtctaaataatggaagcaagcaatacacatggttaggaagacaatataaagatattaaatctttcccaattgatttacagattttataaattctccagtgataatctatacagtgttgttcatggaaattattaagacggttctacattttaaaaatattttaattgagacaaggtctcactttgttgcccaggctggtttcaaactcctggggtcaagcgatcctcctgcctgagcctccccaaatgctaggattacaggcatgagccaacatgccagccagattgttctacattttatatggagaagtataaagcaaagagaaggtagaacacttctaagaaagaaaaataggaaacttgtcatactgctttgtcttattataaaactttagtaatttatattgaccattggtattgtgtcaaggatggacaaatggtgaatgcaacaggataggccagaacaagatccatttacagatcttagatataaaatagaagcattgctccagccagtaggaaatagggtattattcaacaaaaagaactgaaaaaatggctaccaatatagaaaaaaagtgaaattgtatttctacctcatatcccttacctactatggtagggatgtcaactacaggtatattaaatgaaaatatcaacagcataatttaaaaactcttagtaaaaaatgtaaactaataacttttagacttgggggtacaaaagagattcttatacaagccatgagagcatcattataaagactgataaatgtgactcttgtaaatccagatggaaagagaatctttctttttccaccaacacaatggactagttgatgaaagaccttttcctagkacagcaaatttgaaaaggttggaccatatgtacacacacacacacacacacacacayacacacttctctcatatatgtaatcatcactattagagatacaatgattaataaagcaaagtcctttttataatggaagtcatatatacacatttttatatgtaaagtatttaatgtaccccagaaaaaataataaagggcttcaagtacataagatgaaaagaggatttctgttacagaatgaaaatatattagattcagggtattgtaacgtattttggtttgttctcacattcattttaagatatattacctaatcttgcctaattattrtatgttcttttttatttatttcctttagccaaacatttgatattttaatagtctctgtggttacttttcttacaagagattttatttaaacctcctaattcatctgcttccctgagatgcatatcacrgaataatgggtcttttccyattttaaaagttgaatcagcttatttgagtactataaatgcaattatagggtctatttctgtttctcaaatagtgctattcattaatgacaatgacactttgcaaccttaaagcacmttttatccaaggatcatgaagacatttccacaggagaaattactrttatctcagttttttgatagatcaagaagaagagttggttcagagaattagaaatgctattcaactacatttcttgtcgtgtctttttttttttaacacaccaaaacagttaaagccattttcaacctaaaattgggcacacatttttaatacttctatatttggtttttatggaaacgaattgtgtattttagccaaggtaaataaacatggatacttatccagtgcaattctgaagaatgattacactttctcaagtccaccttatattatatatatccacrttgaagtaatgagtattaactcttaaggacaatctgaaacaagttattaatccatgccagtgtctgatactcactctacactattcttgaagctttataatgtgacatgaagtgaaacatttatttccagacttaatatgatttcacttattcatttaataactattcattgagaactcactagatayttggatgttatgggtgtctgctggaagaaatagactgacaacctgtaatgactcaaacagaatagaagtttgttttatactcacacaattatgctaaaggratggtggattaacaggttagtagcacggatattcatgcactcacgctggaatccagcctaatgtaagttctgtcrtttttaacatgcagatgctcaaagtgtccagcataacattttcattctagccagctaggaagagaaaagaccatagaagaccacttagggggttttaatgccctccwatgtagtgcatatcacgtgtgctcacaattgattgtctggaactaataatttggccatgcctaagtgcaaggaagactggaaaagggtagcctagctatgtgcccaggaaaaagataatatttatttggatcctcatccaatagtctgagctatatatatggtggagaatgtgatagaaatattttccacaatcacaggcatatcatccagcgatttatatcgatcagttaaacaaaccaaatatttttagatatttaaaagtactatgaaggcaataatgtgtgtaatagtgaatgacagggatagaaatcaggctaaattagatatggtgatccgacaagcctctcttgatattttgggtgggatacgagtaatgaaagaagccagtcagaagatcaagtcgggaagaacactgggaagagaaaacagaaaatccctgagagagagcaaccttcatgtgcttgcaaacagaaagaagaccaggttggaaggagtacagaaaatgagcaagatcagataaataagagacttaaaggccatgataagcctttgagttttattctaagtgaaatgggaagccattgaaggatatcaagaagagggatattatttgatttgtgtttcattgacattctgactgtagggtagagagtggattgttgttgttcagtgtgaatgcaggatacctgctaagagttcagggagaggttatagtagccaagacaaggttaatgcaagagggggtaaaaagaatgggcaaattctagatacgttctgaagatagaacctgtccatgcattagatgtaagcttttttgagcagggggtggggacaggttctctctctgtcacccaggctggagtgcagtggtgctatcacagctcactgcagcttccacctcccgggctcaagccatcctcccaactcagcctcttaagtggctggaattacaggtgtrtgccaccatgcctggcctagatatgggccttgtttatttttacctctggagaagtttagattttattttaggatctggtctccagatctggcatccactgagccatacgtcagtctttggttggtccacatacatttagggaagaaatgattgaaggggggttcagtccagttgaagaggaggccagatgagaaaggctcagcagtgggccttcatccccagtgaatggagtgttggagcgagggagcagtggctgctgaaattatctgccttttagacctgtgttgttttaatctggtcagcactaaccatgtgggtgttgagcagttgaaacagggctaatctgaattgtgataagctgtagtataaagtatacataagattttgaagacttaggaaataagtgcataaagtacctcaatatttctatattgattatattttgatgtgatatttttcatatgttagtttacataaagtatattaaaattaatgtcaccattaaaaaaatttagactttttaagaaaataatttacatttacaaaaaatctgaacatagagcacaatttctatattacacccctccacacacacatagctcccccaaccgttaacatcttgtatgaatgtggtacatgtatgaaagctaatggatcagtatgatacatcattattaacttagtttacattaagatttagtcctgtgtgttgctatagatgtgggtattaaattaggttttgaattgattgaatggttggacagtaagctgcttactaagcggagatgactgtctgaagaacatgtttggaaatatgtaagaatcaagcattgtgtctgagataattatcaaacaataacgtggagatacarataattggaaaagtctgcattcagggctagacatataaatttgagactcatcagtggaggaatgaggttaaattttaacttaaaatgtgtcaaagagtaaaagagaaataagaaagtggagaaaatgaacacaattttaccatgaagggagtgaaaaatgaagcagtagctgaatgagtctgtggggatagagtaacggattttagttgctttcttcttgagagctattagaactgatttgtaaattgatggggatacttctgccaaaagtctaaatttgtttatgtaaaagaaagaaaagataactgaactgaaagtgcatggaaggtgagagtgatggggccccagcaccaagggaggacattcctttgattggacctgggatatgtgttgcatcaggagggatgggagaatatgagtgtggatacaggtaggcggtagattttgtggtggaatgatgaggaagtttttgtattgctgtcttttctcagtggaaacgtatgaagcaagccggaatgacaggggaaggaaggtgttggatatgtgagggatgagaataagtcatgaaacagtcaaatattacctagaagcgagggggaaatgggccaactgggaaagtgtgataggattgcagagcaatgctgattgtccatgtgaaatctgagggtatgaatttaaagtaagaccagacagcagggacaaggtaaaggaagtgaggcacctagcatgcaaaattcagggagatagattccctctcggagtcatgccctgggcatctcatttgcctcagcctagtcctggtcttgtcagacaataaaattttatcattttattaaacaatgttcrgcttcttgggtgcaggcaaagaagatgtacaattgaatttaattgtacaatgactgtgattttgatagagcaattcactggacagagagaagcgcaagagaatagagggtattccctagaaagatcatagaacatgtctaggaataggagagaagagtcactatcatgggagcgaagcagtgtgacaaaacrgggtgattaatgaattgggaagtgtaggaaatcatagaattgttgcagtgaggatggaaggtggtgtccaaagaggaaacttttggagatgatatggttactaracaagacaayttccagagagtgactatgatagtatgtgtcaagatgcgtgaatgattttttttttttaaatggtgattggggccaggcatgatgtctcacacctgtaatcccagcactttgggaggcagaggtgggtggatcacctgaggtcaggagttaaagaccagccttgccaacatggtgaaaccctgtctctactaaaactacaaaaattggccaggcatggtggcacatgcctgtaatcccagctactcaggaagcttagacaggagaatcacttgaacctgggaggcggaggttgcagtgagccgagatggagccacttcactccagcctggaggacagagacaagacttcatctcaaatcaaacaaacagacaaacaaacaaacaaaaaaggtaattggaaataagtaagtctaactctgcagccaggatgttgagtgttgagtaaattatactaccaccaaagagataacagaaatgtggttggaggagaatacagtaagtcacatgctaaaggcttcagagaactggggtgagtaattgatacatgtaagagtaatcaagttcctaaataataaaactatatgattttaattcaaatatgtgaatctatttaagtgtaataaatacttagtaaagtaaattggataaggaaagagagcatgaataattgagacactgttgaaaattgctacttcctatggcattttggtcaatgacaaatctcacatatttattctttatttaagggtgctaaaaattactaaattaacccatttcatttctagctttcttatttttttcctgcttttccaatagtttaggcagtgatgatcaggaaaataaggttttggtagcatgaggggagcagggaagaataaacttgacaaaaaactgagaggattgcactaacaaagagatgtataatttttgcacataaaggtgaatgcattatttttacattgtgttttgcatggtgtaaacaagaaaatgtatactaagggggcataagtgcagccaraggaatggaagatgatgagtgtttgcgttcattgcacatctattgtgtaccagtcatatacactgtcatctcatgcaacacttgtaacagtttaggaaggttggggttattatgcctgcttggcagatgagaaaacaggcttaaggagggtaacttactcagatcacacggataattggtagagccagaaagcagactctagtccctgcatcccaagcccatattcttcccctgcgcaatattcaaaagagccaacatttgaaaaaaaaaaycttcattgaatatatcattttccctacaaaaccatgttggagtgcttgagatgcctacgaataaaaatatactttttcacacatttcttattgaacagaaaatattcaaggagatgtgtgacatctaagggtagcacctgatgagtaaacattacctcacaactccatgttgtttgtttccatttctgcactagcacatgtggatggaaaagtttgttttaagacagcatcttgctctgtcacctggagttggagtgcagtagcgcaattctagttcactgtaacctcaagctcctggtctcaagcgatgtttctaccccagcctcctgagtaatgaggagtacaggtgcatgccaccatgcctggctaatttatcttttggtagagatgggggtctcactgtgttgcccaggctggtcttgaactcctggcctgaagagatcctcctacctcagattcccaaagtatgagccactgcacccagtgtgaaaaccattttaaaaaattaatccacttttggctgggcacatttattcatgcctgtaattctggcrttttgggaggccaaggagrgaggattgcttgaccccaggagttcaagaccagcctgggcagcatgcaaaaccctatgtctaccaaaaattacaaaaattagctgggcatggtggcacaggcctgtgatcccagctactcaggaggccaaggttggaggatccctcgatcctaggaggcagatgttgcagtgagccaagatgacaccaccgagttccagcctgagtgacagagggagaccctttccaccaccctcctcaaaaacaaaattaatacacatcaaaatttmtgaaatacctaacgtataggatggagagaaataaaacaggaaaatgtgagcataatttatcatgtaaaatatgtgtgaatattgcttaatcaaatatatttgttatatttctttttttaatgtaaatagcatttcttttttttccttttttcttattatactttaagttctagggtacatgtgcacaacgtgcaggtttgttacatgtgtatacatgtgccatgttggtgtgctgtacccattaacttgtcggtatatctcttaatgctttccctccccacttccctcaccccacaacaggccccagtgtgtgatgttccccttcctgtgtccatgtgttctcactgttcaattcccacctgtgagtgagaacatgcrgtgtttggttttttgttcttggggtagtttgctgagaacgatgatttccagcttcatccatgtccctacaaaggacatgaactcatcrttttttatgactgcatagtactccgtggtgtatatgtgccacattttcttaatccagtctatcactgatggacatttgggttagttccaagtctttgctactgtgaatagtgccgcaataaacatacgtgtgcaagtgcctttatagcagcataatttataatcctttgggtatatacccagtaatgggatggctgggtcaaatggtgtttctagttctagatccttgaggaatcaccacactgtcttccacaatggttgaactagtttacagtcccaacaacagtrtaaaagtgttcctgtttctccacatcctctccatcacctgttgtttcctgactttttaatgatcgccattctaactggtgtsagatggtatctcattgtggttttgatttgcatttctctgatggccagtgatgatgagcattttttcatgtgtctgttggctgcataaatgtcttcttttgagaagtgtctgttcatatcctttgcgcacttsttgatggggttgtttttttcttgtaaatttgtttgagttctttgtagattgtggatattagccctttgtcagatgagtagatggtaaaaattttctccccttctgtaggttgcctgttcactctgatggtagtttctttcgctgtgtagaagctccttagtttaattagatcccatttgtcaattttgrcttttgttgccattgcttttggtgttttagacatgaagtccwtgcccatgcctatgtcgtgaatggtattgcccaggttttcttctagggtttttatggttttaggtctaacatttaagtctttaatccatcttgaattratttttgtataaggtgtaaggaagggatccagtttgagctttctacatatggctagccagttttcccagcaccatttattaaatagggaatcctttccccatttcttgtttttgtcaggtttgtcaaagatcagatggttgtagatgtgtggtattatttctgagggctctgttctgttccattggtctatatctctgttttggtaccagtaccatgctgttttggttactgtagccttgtagtataatttgaagtcaggtagcgtgatgcctccagctttgttcttttggcttaggattgtcttggcaatgagggctctatttttggttccatattaaccttaaagtagttttttccaattctgtgaagaaagtcattggtagcttgatggggatggcattgaatctataaattaccttgggcagtatggccattttcatgatattttcttcccatccatgaggatggaatgttcttccatttgtttgtatcctcttttattttgttgagcagtggtttgtagttctccttgaagagttccttcacatcccttgtaagttggattcctaggtattttattctttttgaagcaattgtaaatgggagttcactcatgatttggctctctgtttgtctgttattggtgtataagaatgcttgtgatttttgcacattgattttgtatcctgagactttgctgaagttgcttatcagcttaaggagattttgggctgagacartggggttttctaaatatacaatcatgtcatctgcaaacagggacaatttgacttcctcttttcctaattgaataccctttatttctttctcctgcctgattgccctggccagaacttccaacactatgttgcataggagtggtgagagagggcatctctgtcttgtgccagttttcaaagggaatgcttccagtttttgcccattcagtatgatattggctgtgggtttgtcataaatagctcttattattttgagatacatcccatcaatacctaatttactgagagtttttagcatgaaaggcagatgaattttgtcaaaggccttttcttcatctattgagataatcatgtggcttttgtctttggttctgtttatrtgctggattacgtttattgattttcgtatgttgaaccagccttgcatcccwgggatgaagccaacttgatcatggtggataaactttttgatgtgcttctggatttggtttgccagtattttattgagaattttcacagcgatgttcatcagggatattggtctaaaattgtcttttttggttgtgtctctgccaggctttggtatcasgataatgctggcctcataaaatgagttagggaggattccctctttttctattgattggaatattttcagaaggaatggtaccagctcctcattgtacctctggtagaatttggctctgaatccgtctggtcctggactttttttggttggtaggctattaattattgcctcaatttcagagcctgttattggtctgttcagggattcaagttcttcttggtttagtcttgggagggtgtatgtgtcgaggaatttttccatttcttctagattttctagtttatttccgcagtggtgtttatagtattctctgatggtagtttgtatttctgtgggattggtggtgatatcccctttatcattttttattgcgtttatttgattcttcyctcttttcttctttattagtcttgctagcggtctatcaattttgttgatcttttcaaaaaccagctcctggattcattgattttttgaagagtttttttgtgtctctatctccttcagttctgctctgatcttagttatttcttgccttctgctagcttttgaatgtgtttgctcttgcttctctagttcttttaattgtgatgttagggtgtcgattttagatctgtcctgctttctcttgtgggcatttcgtgctataaatttccctctacacactgctttaaatgtgtcccagagattctgttatgttgtgtctttgttctcattggtttcaaagaacgtctttatttctgacttcatttcgttatgtacccagtagtcattcaggagcaggttgttcagtttccatgtagttgagcagttttgagtgagattcttaatcctgagttgtagtttgattgcactgtggtctgagagatagtttgttataatttctgttcttttacatttgctgaggagtgctttacttccaagtatgtggtcaattttggaataagtgtgatgtggtgctgagaagaatgtatattctgttgatttggggtggagagttctgtagatgtctattaggtctgctttgtgcagagctgagttcaattcctggatatccttgttaactttctgtctcgttgatctgtctaatgttgacagtggggtgttaaagtctcccattattattgtgtgggagtctaagtctctttgtaggtctctaagtacttgctttatgaatctgggtgctcctgtattgggtgcatatatatttaagatagttagctcttcttgttgaattgatccctttaccattatgtaatggccttctttgtctcttttgatctttgttggtttaaagtctgtttcatcagagactaggattgcaacccccgcctttttttgttttccatttgcttggtagatcttcctccatccctttattttgagcctatgtgtgtctctgcacgtgagatgggtctcctgaatacagcactctgatcagtcttgactctttatccaatttgccagtctgtgtcttttaattggagcatttagcccatttatatttaaggttaatattgttatrtgtgaatttgatcctgtcattatgatgttagctggttattttgcttaatagttgatgctgtttcttcctagccttgatggtctttacaatttggcatgtttttgcagtggctggtactggttgttcctttccatgtttagtgcttccttcaggagctcttgtagggcaggcctggtggtgacaaaatctctcagcatttgcttgtctctaaaggattttatttctccttcacttatgaagcttagtttggctggatatgaaattctgggttgaaaattcttttctttaagaatgttgaatattggcccccactctcttctggcttgtagagtttctgccgagagatctgctattagtctaattggtttccctttgtgggtaaccctacatttctctctggctgcccttaacattttttccctcatttcaactttggtgaatctgacaattatgtgtcttggagttgctcttctcgaggagtatctttgtggtgttctctgtatttcctgaatttgaatgttgtcctgycttgctaggttggggaagttctcctggataatatcctgcagagtgttttccaacttggttccattctccctgtcactttcaggtacaccaatcagacgtagatttggtcttttcacatagtcccgtatttcttagaggctttgttctttcctttttactcttttttctctaaacttctgttctcgcttcattgcattcatttgatcttcaatcactgataccctttcttccagttgatcaaatcagctactgaagcttgtgcattcatcacgtatttctcgtgccatagttttcagctccatcaggtcatttaaggacttctctacactggttattctagttagccattygtctaatcttttttcaaggtttttaacttctttgcattgggttcgaacttcctcctttagctcagagaagtttgatcatctgaagccttctctcagcttgtcaaagtcattctccatccagctttgttccattgctggtgaggagctgcgttcctttggagggggagaggtgctctgatttttagaattttcagcttttcwgctctgttttttccccatctttgtggtttttatctgcctttggtctttgatgatggtgatgtacagatgtggttttggtgtggatgtcctttctgtctgttagtttccttctaacagtcaggaccctcagctgcaggtctgttggagtttgctggaggtccactccagaccctgtttgcttgggtatcagcagtggaggctgcagagtagtgaatattgctgaacagcaaacgatgctgcctgacygttcctctggaagtttcgtctcagaagggtacccggccgtgtgaggtgttagtctgcccctactgggaggtgcctcccagttaggctacttggaggtcagggacctacttgagaaggcagtctgtccrttctcagatctcaaactccgtgctgggagaaccactactctcttcaaagctgtcagacagggacatttaagtctgcagaggtctgctgccttttgtttggctatgccctgcccccagaggtggagtctacagaggcaggcagacctccttgagctgcagtaggttccacccagtttgagggaatccgggctgctttgtttacctactcaagcctcagcaatggcgtgtgcccctcccccagcctcgctgctgccttgcagttggatctcagtctgctgtgctagcartgagtgaggctccgtgggcatgggaccctctgagccagrtgtgggatataatctcctggtgtgccgtttgctaagaccgttggaaaagcgcagtattaaggtgggagtgacctgattttccaggtgcygtctgtcacccattcccttggctaggaaagggaattccctgaccccttgcactttccgggtgaggcgatgcctcgccctgctttggctcacactcggtgggctgcacccactgtcctgtccacactgtccgacaagccccagtgagatgaacctggtacctcagttggaaatgcagaaatcacccgtcttctgcgtcgctcacactgggagctgtagactggagctgttcttatttggccatcttggaaccccactctgtcaaagttatatttcttacctgtgttgttattaaaccttgataaattaatgactatattaacagacatttgtcatttgaaatttttttgtggacaaaaaaaaaattcgccacttaattctgtttctcagagtggccagtttcagtacaaacaatgacatttttaaaagatggcaaacttgtaggawttattaaacagctaatgagttagttccttatggctactcaacgatgctctttctacattgaccagagttccatggcagtcatttgaaatgagtcaatatgtaatggaatcagttcttcctgaaaaagggttgaagtaattcaactgcaagcctaatttaagactagaaatcgcattaggaaaacaagatgcaagggtcatcagtaataaaaaccacttcagctactggtgattaactcagagcccmttcacagatatgtcaaagtttccccgtggtttctaatgtcacattaataacaaagtgagaggatttatttggtytctccrtttgtgaatataaaagatgacagaaaatatacatgaagttcataatgtcatgaagagggaagcatggatttgcttgggatcattaggggatgcctctttcatgctttcctataatttattgattacttgctcagtactgaacactgtctttgctgcagtgcttacaaagataatagatacttttgcctttcttaagaagaccatagttttgtgaagattgcagagggtccacccagtgttgagcacataataggctctaaaaaagtatctgtgcaataaatgtttggtcaggtacagaatggatagtaagtctgtggaatgttgcgagtgcttcgatattgcatgttaggacataaagaggtggttgggcaccttccccagggttggagtaagattaagcttctgtaagtgcatgacccttgagcctcatcttgaaggaattatatagagaggggtaaggaggaaagagaatgggaaattagagaaaatagcctgarcaaagacagaatggtgagacagagcataatgaatttagggaccggaattttaggtataggtggcattgtgttgaaagagatcagagattagtgagagtgacatcaggaaaacttatacgctcactgagtttatatgttctcatatagacagtggctctcaaacacaacatttccacaaaacaacaaaagaaattatagttaatacgtaatatgatgtactaaatgttttatatatattgattcatttaatccttatatatccctctgaggtgggaattgctattagcccactatataactgagaaatgtgagatatagggaaattaagaaatgcattcaagacaccacatcaataagtgacagaggggcgtttgaacccaatgatctgtctccagaacccacacttataactgctttagaatattgcaccttaatacaatgtcaaatttagtgtaacttgattttaataatgatattcaaagtatctaagttggaaattattatattttgtgacaatgtggctctctaatgagctctcttgagaggctttcttgacttggatatagaaacagctaacacattaggaattatgtataactyagggtatattcatggtaatgtgttatacaaattacattatttcatcttaggtactgttattgtaaaaaagattgggaactgctgttgtagaagataaggagtcattgagtcaaggagttgacaacttgggagattttaagtagagaaaattaagtatccctttattgaggagagaatatgtaattaaaatatttcaaagtgatatataaatgtcagaagttgatcatgttaatgtgaaattctcaacatacgtgtttttccagccagaaatatcttcctcatttgaatttcaataatcttttgtctagccatcacttagagaactttcaacatcctttctattactatgtgttggtgtgtactgaaagtaaatgtgcagtgaataatttatccccatgcactgttctaagcacttgacaagtgttgattatttaattctcacaacaactctatgagaaaagtatcattattactcccattttacaggtgaagaaactgaggatttaagaggttaacctgctcgaggtcactaggagctgagaaaggttttggtcaggtttggcaaataggttctacttscatatataaggagtagctaagatagtactgcttgattggagagctcttattttattccctgagtaatgtacatctatcratttatatataaagtcatttctcatgtgaattaataataatagtaataataatgtacatatttacagctcttttaggacttcaaaatttattcatatttattgttaagtctgtgtggtaagtgaaggaaaagggacatacacaagttgtggaaatcaatggggaatggagtgagcctggacatggaacttccagttccrggagcagagctctttcttccatgcggtgccatctcttgcagcctcagcagttcctgatgataccagatgtctgtagtctcatcagagaacttacaccatgtttagatttttaggaagaatcaagaaaacagaatattagacatctgtccattaattactggaaaagtattcacattgttgttatgtgactctgattacatttatttacaggttactgtgtttttttgataaagtcatcgatttgtttgataagttaaatattttacaattttgtgatggctggtaattaggtaaacaactctacagatagaataagaagctcattataagatgggaatatgtacagttgacgtatataactattagttatgtatacttttggagaatacagtatgagacagagataacaagaaggggaaaccctctagcacagtttagaaattaaatccaatatcctgtgagaagagagtcagataaaaggcctgcagagggaagacagacaccaagaaaagggattggtgtcaggtgaatttttcaagacaggaaagaataataataataaaaaaatgtagagaagcctaaaagctgttagagaaaaggaaagtctgtatagatagtgaagctagatggaacaagaagacattggggtggtgatccatttctactcttcccctgtaattacataaaagttaataagagggaaaataaaagtgagcagaaactattaagagaaaagatgaaaacttccgagaggaatggagtttagaaaagactacagttcttgcaccctgctgctctgccactgttagacctgtcactgtgaagggggagaacaatcatgatctgggcagagttgggacttcccatagatcaatgcctcacccattgagaggttcccaacagtagaccacattgatatactcttgggcagaggtagcagaggcacaggaacggtgctctctaactgctttagagagtttggaaaaagcaaaactcaggattctggccagaaagttctcctgccatattttgaattgctgtttgtagttcgtattgtacaatagctgtcatgcttcaaaacatttacatttttctctattaactatcatactatgtagccagtattgaatattcagcctatcaacttttatttatttagctgttatgtgcattgcttaayttggatactcatcayttactttctaatatgtacaataaagcacgtcttactcgtgtgtgtatgtctgggcttctttttcatgtaaaagatattatgctatcaagaatgaccttgtatggattgcaatctttgcatcacttacttcacacaatatatttttatctaccattccttctaaaagaaaaataaacccagtgggctatcttactaaaactttattaacattgttttctaaatctttataggcagtgctggcactcctgtcacttttaatgaaaacggagatgctcctggacgttatgatatcttccagtatcaaataaccaacaaaagcacagagtacaaagtcatyggccactggaccaatcagcttcatctaaaagcaagtatcgtcataaacatatattaatgtatatagctctccaggagggatgctttatttttaagtgtataacttttgctagaataggttttccccataaataaactcttagaaaatgtatgacttgattctctcttcaatttaaaaatgttatggacattcttcagcctctttagagaaatctcctgatatctgtaagaatttaatgaatgatctgatttttttyctgcagttgactatacccttagataaattttgcccttttatgaaagagtcatttgttgtaatctttgtacattttttgtatgtctgtgtgttggaggtggtgtggaatcgactgaatatgccctcatttataaatttgggcttaaaaaaaggtcacatctggctaacaaggtgaaaccccatctctactaaaaatacaaaaaaaattagccaggggtggtggtgggtgcttgtagtcccagctatttgggaggctgaggcaggagaatggcgtgaacccgggaggcggagcttgcagtgagccgaggtcgcgccactgcactctagcctgggcgtcagagcgagactccgtctcaagaaaaaaaaaaaaaaaaaaagggcacatcacttttgccacatcacaaggggagaccttctggctatatctggttgatagaagtgaatcatactctgtgtttatattgcctctttcagttgcaacaccagggaaggttgatgtatctaagggtgatgttcagattacttaacagcctttagagctacctgctatttttgtctaccgcaggcactcttcaggtccagtgtccattaattctgcagtttccacaagtggccatgtgagggcgacttgaagagcccagccggaagcaagttcccaaggcctgggattggtgcccaaaagcacctgggcatttgcctgccaggtgccgcaccatcacccagagttctgtttctttcggctggagtctgatgggtacccagtggggttagcacgtggggatggcagtacggaggaggaacttcatcaggtgtctcaggctggtgggcactccctcagaggagctctcttagggcagaggtctttgggggatttggggagagctgctaggtaccatcactcttcagtcctaaggggctctggaacaggaaaccaattctgaacttgatggataagggaggcccaggaaatcagtgcacagggctgtggatgctggggtggggagggcarggagggcagcatctacttaccaccaggtgaagaattatttcacattttaacagcmctttgccccatattagtgcacactggcttttttaagtatagagaagtatggagcacgttctgtagtctcagtcgaggtttagagttcattcatccagcatctcttccacagaaaagtaggacttttcacagaaatttggtggccaggaaataactacaagaacagtagacatggacacaggaaggggaacatcacagtctggggactgttgtggggtggggggaggggggagggatagcattgggtgatatacctaatgctagatgacgagttagtgggtgcagcgcactagcatggcacgtgtatacatatgtaactaaccttcacattgtgcacatgtaccctaaaacttaaagtataataataataataaaaatacataaaaaaagaacggtagacagtaggatgtttttaaaatgcttcaaataaactaggaaaatattcttcttctgttctgttgttttaatgtgtaattcactctttcctctagcaaaaaacatctcctcttcttgattctcagagctaccataatactgtgagagtgtatacatgctttctcatgtttgaacctaatcagaagacatcaatttgatatttttaatcaatttttttttgttttgtatttccaaatatgtcccccaaagtgatatgtctatgcagcaccagtcaccyaagttctcagaaaattagacgatgagaaattacaaaactagggagattatgatttattttcttcctcataattattrcagctatgcatttaataatgcacagacagcttatgtttctaactattgtagtgatacgtaaggccacatatcaatactttactacttctaggtgcttcatgaawtcttatccattgttctgcawtccatattgacatttattgaaacacaactttgataatgccacaggttattgataatcaatagctttttgacagaagcccttttgaaagaggacctataggaaatgaaataagacagaaatgttttgacaaggtctaagataggaaagctttttatctgacttttattaatgtcggactgcctatcattaatatattctgatgattagggatttacacagcaaaatccagtgtttgagaaatatatacactaacatacaacaccattacataacataattttacacacaagtacacatatatacacatctcgccatatacgcataatgtagttataaacttcctattgaatctcaagctgctcttttatgtacatttaacagtgcatgaaagttttatgtttatgactgtattatcgttcataaaatgtatcaaaacaatttgtgagaattatttctcatgcatgattatgatcatttataactagatagcgttgcgggttttaccgaaatggaaaatgcatctcttagaagaaaaaacaataaattgcactgtggagagaggttataaattaagaattgaattctgaggattatcaggacaaatcaaatgacttttatccttaggagttggattagtcacctgcttgaaggtggagtagtagagtgcttggcaagctaccaacttgttaatgttttgcttagatctatggcaaagcactaaacaaattatttgcctcagttttatcatgtctamaatgaaaacagtagcacccaccttatatggttgtaataagcattaaatgaagtaatacaacaaagccctttgcccagtgtttggtacacctgagatctataaatgttacttatgattaattcagtatctcaatattctatgtggtcagtgagacacctgatagataatgagtctactgggcaaagcgaaggtcccattagaagagggacttgagtttgtgtgagaaagttcagagacagtctctgcatttaaaatgctgactgtccccacagccagtcctttctgcctgtctttgacattggccttaatacttggaaaatccctctgcactcaaaaaacaaactttatatgagataaatttattttcctgtgctaccatgtgaatagatatcatcacstaggcagttattttttgaatagatttgggaaattcagtctgtgctcatactctgttaaaaggtgttgagactatagtgaatatgtgaaccctgttctcagggaactcacagattagaaggagagacaaacactcggaccaaccactctagcgcaatggagcaggtgcactgatgaaggtatatatatatgggtttgcaatggcagcctagagagaggttgctaatctggcctgacctctggtgggaattgtcactgtggccaaaggaggatactgacaggaggatttactcttatccatatactgtatctcttcttgttctattaaaccagatttatgatagctttcacattctcagtggtaagcatttatcagtcagttattggattgaactctgcttgttttcaaagagccagtttttctggctgaattcaaccatagtataaatttgtacaaagagggtatatggttaggcatattggaatgcagtaaatttgccttgaatatctcttagtggattgaacgaattttttaaataagtagattattctttttctttttcctggaaaatatattaggtatttcatttcctcaaaagcattatctttattgttccaaacattactgtttcttttttctttttatgaaactaacatatgttcttaatttggcaattacaatcagcataatttgtttaagttttctactcagtaatctyggcccacacatgaggcrtgtattgtctacctgagagtggatttgaacaatgagtctctctattttattaggcagaatctctcaagagacaggtggtccttattagtgattacaaaacatattgtaacctagaggttcagagtaaacagaagagcctgaactgtgaaaagaacagccatatgctgctctgtgtccacagggagaacgtgtactggggatgctgtatgggccaaaaataactcggggctttttttaatgctttttccaaccagatccactttttcttgattactgtaggaatgaaacatatgtttttattggtttcaacatattattctttttataatcaaggaaataagttgaatataaatgataaataacaaagaatagtgacttcacaagggtgtcccaatctgcccaattattagtggcagagtgtaatttggaagggtgatttgaaggagaaactgaattaataattttgaacctgatttaattttcagtggatgactccatagaagaaaaacttctgacaggatactgagctttgagcctcagttttctcatctaagtgggataatagatattattatgaatagtagatgcattgtaatatggtgatcaagaaaaagatctcaaagtcaaacagaagatgtttgaattctgacctttcattcatgagctgtatagccagccttgggcatgtgacttagactcaggttctttatctaccaacttgatagagttctgagatcatcaaggaaattrcatgtacaaaaatcctagaacattgactggtacatattaagtattgaacgaatgtgataataataatttttgttttgttttgccagtacaaccagcctactatagaggacctatagtgggtatttcagtatgaaatcaaactgaagctgtatttgcagtcttctttctgtctttattctgatgttctgaatagggagtagctgtaaagagaggtatatgcaccatgataacttgtctgtctacacaataagcccaaagtatttgttttgatatttaaaaaagtagccyctgtgattcaaatgctttgggaaaaactaaaacttgagcaaactttctgatggaattttgctccattaaattggtctttaccacatacctatagtatagtatttattttaattgaatgtatgtattttcctrtagatgatcagttaaatatatacatgctatatgtatgtatactggggcttccttggcttgcttggattaaaaaaagggaaaattcctgagtctccccatttgtctcagggattttgtttttattctggataaacaactgtttttttttaatgcaaaaatcattactttcattaatttcatagaggaacagcttttatataatgaaaaatattaaaatggttttgaagtaacaatggactgaatagagttgaaacagggtttgagagaagacttgacctttgcttgctttgacagttaggaaacatgcattttctgtttgcctctgtttccctgtttgcaaagttgcttacatgtgaaaatgctctttcctatgatacatatatacacaaacacatacatacatacatatatatatgtacacacacatattcaccctatgaaataagtattatatgatgcactccttttcctacatagcataagtgtgagtcaattccctgggccctttctctatattctgttagaactttaaatgccactctatttgtctgttgttggtgtataagaatgcttgtgatttttgtacattgattttgtatcctgagactttsctgaagttgcttatcagcttaaggagatttkgggctgagacaatggggttttctagatatacaatcatgtcgtctgcaaacagtgacaatttgacttcctcttttcctaattgaataccctttatttccttctcctgcctaattgccctggccagaacttccaacactatgttgaataggagcggtgagagagggcatccctgtcttgtgccagttttcaaagggaatgcttccagtttttgcccattcagtatgatattggctgtgggtttgtcatagatagctcttattattttgaaatacgtcccatcaatacctaatttatagagagtttttagcatgaagggttgttgaattttgtcaaaggctttttctgcatctattgagataatcatgtggtttttgtctttggctctgtttatatgctggattacatttattgatttgcgtatattgaaccagccttgcatcccagggatgaagccaacttgatcatggtggataagctttttgatgtgctgctggattcggtttgccagtattttattgaggatttttgcatcaatgttcatcaaggatattggtctaaaattgtcttttttggttgtgtctctgcccggctttggtatcagaatgatgctggcctcataaaatgagttagggaggattccctctttttctattgattggaatagtttcagaaggaatggtaccagttcctccttgtacctctggtagaattcagctgtgaatccatctggtcctggactctttttggttggtaaactatcaacagacaaacagagagccaaatcatgagtgaactcccattcacaattgcttcaaagagaataaaatacctaggaatccaacttacaagggatgtgaaggacctcttcaaggagaactacaaaccactgctcaaggaaataaaagaggatacaaacaaatggaagaacattccatgctcatgggtaggaagaatcaatacggtgaaaatggccatactgcccaaggtaatttacagattcaatgccatccccatcaagctaccaatgactttcttcacagaattggaaaaaactactttaaagttcatatggaaccrmaaaagagcccgcatcgccaagtcaatcctaagccaaaagaacaaagctggaggcatcacgctacctgacttcaaactatactacaaggctacagtaaccaaaacagcatggtactgctaccaaaacagagatatagatcaatggaacagaacagagccctcagaaataatgccgcatacctacaactatctgatctttgacaaacctgagaaaaacaagcaatggggaaaggattccctatttaataaatggtgctgggaaaactggctagccatatgtagaaagctcaaactggatcccttccttacaccttatacaaaaatcaattcaagatggattaaagatttaaacgttagacctaaaaccataaaaaccctagaagaaaacctaggcattaccattcaggacataggcatgggcaaggacttcatgtccaaaacaccaaaagcaatggcaacaaaagacaaaattgacaaatgggatctaattaaactaaagagcttctgcacagcaaaagaaactaccatcagagtgaacaggcaacccacaraatgggagaaaattttcrcaacctactcatctgacaaagggctaatatgcagaatctacaatgaactcaaacaaatttacaagaaaaaaacaaacaaccccatcaaaaagtgggcaaaggacatgaacagacacttctcaaaagaagacatttatgcagccaaaaaacacatgaaaaaatgctcatcatcactagccatcagagaaatgcaaatcaaaaccacwatgagataccatctcacaccagttagaatggcaatcattaaaaagtcaggaaacaacaggtgctggagaggatgtggagaaataggaacacttttacactgttggtgggactgtaaactagttcaaccattgtgraagtcagtgtggcgattcctcagggatttagaactagaagtaccatttgacccagccatcccattactgggtatatacccaaatgactataaatcatgctgctataaagacacatgcacacgtatgtttattgcggcattattcaccatarcaaagacttggaaccaacccaaatgtccaacaacgatagactggattaagaaaatrtggcgcatatacaccacggaatactatgcagccataaaaaatgatgagttcatgtcrtttgtagggacatggatgaaattggaaatcatcattctcagtaaactatcgcaagtacaaaaaaccaaacaccgcatattctcactcataggtgggaattgaacaatgagatcacatggacacaggaaggggaatatcacactctggggactgtggtggggtggggggaggggagagggatagcattgggagatatacytaatgctagatgacgagttagtgggtgcagcgcaccagcatggcacatgtatacatatgtaactaacctgcacaatgtgcacwtgtaccctaaaacttaaagtataataaaaaaaaaatgccactctagttcttaactttgtacttgattatgaaaatactttgttctgtttcctttccttgcaacaagatgatttttaaagctgtgtatttgtttattagatgctaatttattctttcaaaaagtcattttgargtcattacttatatctctgtttataaaataacaagataaaagataacaatatgatttggtagagtcatattattcacacattgagcaagtgttaaggtgattaaattttaaccacatccttgccaagcccagaataagtactcaataagtgtgtatttaatatgtcatgaataatatgctgatcttttctacatattgactgaacatagatggatgatccaagattatctattaggaagtacactcatgtacagattatttattcagtgactgttccctgccaggcaggatgatagtccatggyrgggcatcagtataagatatacagtcatccctatgtagatatggggaattggtttcaggaccccacatataccaaaatctatgcatgatcatttcccctartcagaagccatgcatatgaaaaatcaggccttcttataggcaggtttcacatctgccaatacaatattttctgtctgtgttcgattgaaaaaaaccaatgtagaagtagacccatacactccaaacccatgttgtccaaggrtcaactgtatttccagatatcaayggatttctaatttattaaagcaaccatatactcataactacaataattgcataattatacaggtacagattaaataataaactatttgaattcagtggtttgaatgtgaattcaaggaatcaatgatcaccttaaactagggacactggatagtttcttgacatagatgaaattcaaactagactttaaattcttttaatggtcaaaatatttggaagaacatataggccattgaaaaagcatccattcgtccatccaccattcatccattcatatattcattttgtaaaacagcacctccagtttgccaatgctctagtgcaggctgggatggtttagaagtgtcttagattcagttcattgtgtcatccatgaagtaacaggactatgcgggttcagcatccaaggatatgtctctttcatgagcccatactaatacatccagctgtgttcctttattcttttttaactttaaacacacattcattattagcaaagtatgatcagcattcacaaggaaacatattctctcttggtctggaggctgaggaactagagaactgtgttggtgtatctggtttaaaacatttcagtacaaatgggtcaaaaagaccatagtagttagatgcctgatagatgcagcctgactcttaccttccgttctcagagaagcaagataattggaggcaaggaacctgttctacttggctttatgtcttcaatgattagtataatatgggacttactaaatgttcatgaataaattaataaaccaaaaatttaaagcactgttatctttacaaggccaaaaaggtgagctgaccctatgataactgagataatgtataaccgaggagcacactgtagtaagggtagagctaggagccattgtcaaggtaatcaaggacaaactccagaatggataatcacgttaaaagatccttgcaatcaggccagatagaatctgagggaaagtccaaagttacacacaggagcaagaggagtgcatgtatgtgacccagataaaattctgtggggcacgttgttactattaccactggcttttattcttgcccatgccatttgcagacctacaaatactgaagacggccttagagttactgagtgacttctgataactgtctttgaggagcatctgccattgaatgggcagatctgttctgcttacacaaggacttcataatgcaggttgttaagtacaataatacagatgaggacgttgtctaggttttcatacctagataaaggctcagtttctttacgggactgagtatgattctgagctcccagaacagaggaccatcttatcagagaacattgtggggaatgaagagagatagcttgaacttaaattctataagacctcatataccatgagaacattttaagatatttttgagctacactgagtttttcaatagagagatgctcacatttaagcttcaggagaatgtctttggcagcaaagtgcagattagctggagaagaggtagtccgtgagctaagtcaaagccgtaattaagattttttttttctattttacttaattttctgatagattctctcttgcctatttatctactttgttccagccttaattcataaaatatttcgaaaggccttactaagatacatttatcacagtaggacaaataaataagtgaggacattaggaagaaggaataaagggtgttagtgaattttagttcatactcaacttagattttcccaataataataacaaatagattcatctaggctgttcagtagagtaggtgaagtaatcttgttactattttaagaatatacaaaactatgccataccaaatctgatttaatctgattaggacttgagaagctgaattcagttattagatccagttggaggcaggtttctagggcaatctactagtattcagggtgtctagttgtttgtcagggagaaatagggcattaaaaacctatcattataaaaaaataggaaaaaaccacaagaatttaattagttatttaaataataactgaaaataacagaaatagagaagaaacaaaaaaggtagaccacatatgactgagaacatgtgatattttgtgaawagaatgatggttrgcaaaggcagggaggagtgggggaggggaattaagaaggctaggtagtgggtacaaaaatatagtcagctagaaggaaggagttctagtgttcaatagcactataggatgatgatagttaacaatactttattgtatawttgaaaatagctggaagagaagattcagaatgttcccaacacaaagaaatgataaatgtttgaaggagatcctaaatcccctgattttatcattacatattgtgtgcatgtatcaaaatgtcatatgtaccccacagatatgcacaactattatgtatccatgaaaattaaaaagttcaaagatagtggtttaattggaaaaggaaaatcaaagaaagtgatgctgcttaaagacataacgtgaagcaagaaatgtgtttttataccagcaccaaagatggataaaagaagytagtgactctagacttttatggagataataaagtaataaaaatgaaaataaatgatattttaatccttattttaaccttgggaggagtaaaataagtacaattttaacataacaagtagaataaataaggttaaaataaggttataaacataaaatgaagctctgggatggaggaataactggtaaaaagtcattttattgtggtagatttacatgtgaatcctgtatcctagagtacttttaaaagttcagtgggtttcatcagcgttatgtgaaatctaaaacatacaagataattacaactaagaactgaaaagtattgtatattaattaaaagatgtagcctcccattgtagataggccagtgatttataaaagcaagacaaaagaaaaattaatgtttattgactgaatcaaaaatttctcgtgacacctttcctcaaagcttccaataattaactgagggaggagagccaaaagctaggatcctcctaaactccccgtagtatgttaatatggttatggatgccatattttcaaatgaagttacagaaatatgcaattgtgtataatctcaggggtttgaggtataaaataatgttttctttttagattatttcgctttgttgtatatttaaatgatgaaatatacaacaargacatagaaatgtactaaattttactagtatttgattgctttcatttgttataaaatcatttttattgatgttattgtgagataattgcagatacatttgcagttgtaggaaataattaagattccatgtcccttttacatagttttttccaatgataacattttgcaaaattattgtacagtatcgcaactaggatattgacatttatayaatctatcaatcttattcagatctccctagttttacttgtattcctctgtgtgtgtgagtgcatatgcttatactatgtatttagctctctgctattttgttaaccatttatatctgcgtatgtgctaccacagtaaacatacagaacatttctgttatcgcaaggattccttatgttgtcttgttatatccatattgatttctctcccatatgcctcactccccaatgcctgacaaccactaatgtgttctctatttacataattttgtcatttctagaatgttatacaaccccatcaataagtgggcaaaggacatgaaaagacatttctcaaaagaaggcatacatgtagccaacaagtatatgaaaaaacgttcaactttactaatcattagagaaatgcagatcaaaaccacaatcagatgccatttcacatcagtcagaatagctattattaaaaagtcaaaaaaagcaggtgctggtgaggttatggagaaaatgggaatgtttatacactgctggtgcraaagtaaattagtttagccattgtggaaatcartttggagatttctcaaagaacttaaaacaggattaccattcaccccagcaatcccattactggcgtatatacccaaaggaatatagttttggtttttggggtttttgtttgattcagagtctcactctgttacccactctggagagcagtggtgctatctcagctcactgcaacctctgcctcctgggttcaagcgattcttgtggctcagcctcctgagtagcctgtgccaccacacccatctgatatttgtatctttagtaaagacatggtttcaccatattgtccaggctggtctcaaactcgtgagctgaaatgatctggctgctttggctgcccaaatgttgggattacaggcatgagctactgcgaccagccggactataaatcattctatcataaagacacacgcatgttcatgttaactgcagcactgttcacaataggaaagacatggaatcatcctaaatgcccatcaacagtagactgaataaagaaaatgtggtacgtatacatcatggaatactacatggccatataaaaaaggagatcatgtcctttgcagaaacatgggtaccctattaagtactatgcttcttaccttggtgtcaaaataatatgtacaccaaacccctgtgacataccctttacctgtataacaaacctggaccaggtgcagtggctcacacctataatcctagcactttgggaggcccagacaggctgattrcttgagtccgggagtttgagaccagcccgggcaacatgacaaaaccccatctctacaaaataaataataaaataataaaataaaataaaataaaataaaataaaataaaataaaataaaataaaataaaataccagaattagctggggtggtggtgtgtgcctgtagtcccagctactggggaaggggaggttgccgtgaactgcgatcatgtcactgcactctaacctgggtaacacagtgagatcctttctcaaaaacaaaaacaaaaagaacaaaaaccaaaaaaacaaaaatccacaaaccaaacttcacatgtacctctgaacctaaaataaaagtaaaaataaagtaatataaaattttcatcaaagctgtgtaaacaaatcacacagtatgtaagcctttggatttagctttttttactgagcatatttttttttaatttcatccaagttgctgcattgctttttattgttgactagtactctaatgatgaatgtaccaaggtttgtttaaccacccaccctttaaaggacacctgtaaaatagttatgaagaaacctgccatgagcatttattgaattgtatttagagaacagcagggtagagtgatgtcttgtctcagaactgaactaaatcatttcttaatggacagataaaatttatgtatttattatgtacaacatgatgttttgaagtatatatacgttgtggaatgcttaaatctagctaacataagcattacctcacatagtcatgatttttgtgataagaacactttatatccactcttttagcatttttaatgaatacaatatattattatctatagtcactatgctgtacaatagatctcttgaacatattcctcctaagtgaaattttgtatcttttgcccaatatctcacaaattctgccatccttcaatgacccaagcccttgttaaccatgattctactctctgcatctttctagattccatatatgagtgagataatatggtatttatctttctgtacctggcttattttactcaacataatgtcctctagcttcatgcaagttttcacagatgacagtatttcattatttttatggataaacagtattccattatgtatatacaccacattttccttatccattcatccactgatggacacttaggttgattctacatcttgactatcatgaataatgctacaatgaacatgatagcacagatatatcttcaacatactgatttcacttcccctggatatatatcgagtaggagatggccagatcatatggtatttctatttttaattttttgaggaatcttcatattattttccataatggctgcactaatttacattcccaccaacagcttgcaaaattccattttctccatatcctcactaatactttttctctttttgataacagccatcctatcatgtgtgaagtgatacctcattatggttttaatttgcattttcctaatgatttgtgatgttgggcgttttttcatatacctattgtctatttgtatgtcttcttttgaaaagcatctattcaggtcctttgcccaatttttaccaggttatttgttttcttgctaatgagctgtttgagtatcatatattttggataaaacctttagccagatgtataatgtacagatattttctcccattctgtaggatgtctcttcactcttgttgattgtttcctttactgtgcagaagctttttagttttgtatagtcccctcatttatttttgcttttgttttctgtgcttttgragtcacatccaaaaagtcattacttagacctatgtcatggagattttcacctatgttttcttatagcagtttcatagttttgggtcttatatttaagtatttaatccattttaagttaattttcatatgatgtgagaaaattacctaaayttattcttctgcatggtagatatccagttttsccaacatcagttattgaaaagactgtgatttccccattgtatgttcttggtacctttgttgaatcagtttgctgtaaatgtatggatttatttcagggctctctattctgttccattggtacatttgttttcatgtcagtactatgctgttgtagtaactatarctttgttgtacattttaaagttaggtaacatgatgcagctttgttcttttcactccagattgtgttggctattcaaagtctgttgtagtttcatacaaattttaaaattgttttttctagttctgtgaagaatggcacttgcattttgatagggattgcattgaattgtagattgcttggtgtagtatggacattttaacaatatcaactttttcaatctgtgaacacaggatatcttttcatttatttctatcctttcaaattttttcaccagtatttcataattttcaatgtatagatcttctaactcctcgttaagtttattcacaaatgttttattttttgtagttatataaaggggatcactttcttgactttttcagattgttctctgatttttgtatgttgattgtgtgtaatgtaacattactgaatttggatattagttctagtagttttttagtgtttgttataaataacagcatgtcatctacaaacaaggacaatttatctcttcttttctaatttagattcatttgctttctcttgcctattgctttgactatgacctccagtatgtactgaatagaagaagtggcaagagtggccactcttgtcttcttctagatcttagagaaaaagcgtccaacttttccccagtgagtttgatgttagctacgggtttgtcatatatggcctttattatgttgatgtacatgctttttatacctaattgttgagagtttttatacctaattgttgagagtttttatcatgaaagtatgttgaatgttgtcaaatattttttatctgcatctattgaaatgatcatacgttttttgttctcccttcagttaatgtgatgtatcacatttattaatttacatatgttgaaccatccttgtatccctaagatgaatcccatttgataatgctgaagatctttttcacgtgcctttgaattckgtttgccaatattttgttgaagatgttttacatcagtgttcatcagggatattggcttgaggtttttctttttttttgtagtgtttttatctggctttggtatcagggtgatgctgatcttgtaaaatgaatttggaagtattccctcttcaattttttaaggttttaaataattgatatgagycattctttaagtttttgatagaattcagcaatgaagccatcaggttctgggctttttttttttgatgggagactttatattattgattcaatctccttactcattattggtctgtttatgtgtttattcattattggtctgctaagattttctattttttaatagtctggtcttggtaagttgtatacatcaaggaatttacccatttttttctgagtttttctatttgtttgcacgtaattgttcattgtaccctcacaatcttttgtgtttctgatgtatcagttgtaatgtctcctttttcatttatgattttatttatctgtgtctctttaagttttgtcaaatttgttaatcttttccagaaaccaactcttagttttgttgatcttttctagtgagtttctaatatctattttatttatttctgtgatgatcttttttttttccttccttctactaactttgagcttagtttgttcttatttttctagttccttaaggtacaaagttaggttgtttaccttagactggtcttttttgatgcaagcatttattgctatgaactttcctcttggaactgtttctgttgtatcccacaggtttgggtatgttgtatgttcatttttgtttgtctcaagaaatttttaaatttatctttgaatgttctgtaaatatctgttaagtccatttgttctagggtatagtttaaatccattgtttctttgttgactttctgtcttgatgacctctctaatgctgtcagtggagtattgaagtcccccactattaatgtgttgctgtctatctcatttcttaggtctagtagtaatcattttataaatttggaagctccagtgttaggtgtatatatatttaggattgtgatacttttctgttatacaaggcctcttatcattgtattatgtccctctttgtcttttttaactgctgttgctttaaagtttgttttgtctgatgtaagaatgactatctgctctcttttggtttccatttacatggaatgtctttttccacctctttatcttaagcttatgtgagttcttatgttttaggtgagtctcttgaaggcagcagatacttagttggtgaattattatccattctgccattctgtatctcttaagtggagtttttaagtcatttacattcaatgttggtattgagatgtgaggtgctattcattgtgctatttgttgcctaaatacctttttttaaaaaaaaaatttatggtgttgttgttttattggtcctgtgaaatttatgctttaaggatgttctgttttgatgaatttcaaggatttgtttcaagatttagagcaccttttagtagttcttacagtgctggcttggtagtggtatattctctcagcatttgtttgttgaaaaatattgtatctttcctttatttattaagcttagtttcactggatacaaaattattggctgataattgttttgkttaagtaggctgaagatagggccccaatctcttctagtgtggagggtttctgctgagaaaactgctgttaatctgataggttttcctttacaggttacatggcacttttgcctcacagcttttaagattcttccttcatcttaactgtagacaacctgatgacaatgtgtataggtgataatctttttatgatgaatttcccaggtgttctttgagcttcttgtatttgaatgtctagatctctatcaagactggggaagttttcctcgattattctcccatatatgttttccaaacctttagatttcttcaggaataccaattattcttaggtttggtcatttaacataatcccaaacttcttgcaggctttgttcatttttttaaattctttttttctttgtctttgttgaattggattatttcaaaaaccttgtctttgagctctgaagttctttcttctgcttgttcaattctattgctgagactttcagtgcattttgcttttctataaatgtgtccttgatttccagaaattgtgatatttttatttatgctatcaatttcactgaagatttttcccttataccgtctatcatttttttttttatttcatgaaattggacttcacctttctctgctgcctccttaattagcttaataattggccttctgaattctttttctggcatatcaagactttcttcatgctttggatccattactggtgagctagtgtgatattttgagggtgctaaacaaccttgttttgtcattaccagaagtgattttctggttcttttacatttgtgtaggctatgtcagagggaagatctggggctcaagggcttctgttcagactgttttgtcccatggggtgctcccttgatgtagtacttacctactagggggtgtctgcacagagttctgtgatgtgaaccatctttctstctcttagtcatggatagcagcacctgctccagtggaggtggcaggggagtgaaatgcattctgtgagggcccgtagttgtattattgttgtttrttgcactagttttgtgctgattggcctcttgccaggaggtggcactttcaagagagcatgagccgtggtagtatagggaagatcaggcagtggctggagccctagaactcccaagagaatctgatctttgtcttcagctaccagggtgggtagagaaataccatcaagttggggcagggttagacatgtctgagctgattctccttgggcagggcttgctgcagctgctgtgggggatgggtttgtggttcccgggtcaatggagttacgttaccagtaggmttatggctgcctctgctgtgtcatgtaggttrccagggaagtgggggacagccgacagttacaggcytcacccggctcccatgcaatccaaaaggccagtctcactctcactgtgcctccccgcaatagcactgagtttgtttttaggcagtgggcaagcagggctaagaacttgccccaggctaccagcctcccagctgagaaagcaagcaggactttcaggtttcatacctccttgcctgcctgtgtctgcactctggattcactctctcccccaagttctgtccaagaaattttgcatgtttggttggaattgttacaaagttcagcttgaggtttctttttatctgtggtcttttcccagttccactggcaaccctccccaaggatccctgtgagacaaagtcagaaatggcttccctggggaccgagagagcccacagggctcttctggcacttcctctactcctgtatttcacttggctctctaaattgtctcagttctaggtagggtcaaatccttctcccataacctggaccttcgagttccccagtgaggktgtgtgttcaccctttcccactttcatactttgggcactcatagtatttgggctgtctcctgggtcctgcaggagcaatctgcttccttcaaagggtctgtggattcttttggctttcctggtatgttcctccagtagttctttcaggaaaagttcatgatgtatctccacatgctgctctgcctgtctgagtgggagctgcaatttagtcctgcctcccatctgccattttcccccataaatcctatgtgtcacattttctttatccagttcaccactgatgggcatctgggttgatgtcacgtctttgcttttgtgaatagctctgtgatatgcatatgagtgcatatgtctttttggtagaatgatttattttcctttgggcatatgtccagyaatgagattgctgggtcgaatggtagttcaactcttagttctttgagaattctgcaaactgcttttcacactgggtgaaataatttatacccccaccaacaggtaatcatcagagaaaggcaaatcaaaacacttttcaactttctatcaacattatactgtctatggcactagaaccaaactcttactgagtatccaagacttcattaaarttgtctctgctctgtctttcttaagttattctaatactcttctagacttgcctgtaactagttctcatttgactgcttttctagctgtcagagccatgggtacatatgtttttttacattcaggttatttcattagattcaaaaatcagatatgagttctagatgaagccattacattgtccttgagactgctgacccaacatctttgtgagatttttctgaagggaatcagaggagacygcagttgtcatatgctatataaatcccctactaagaacatactttaaacttagtgactgttctttctttttctttttttttttttaatcttgggatttttaattacataaatttagtaaactcttcaratattatttttcatacttcacattacttttttttcttttttttatgatactttaagttctagggcacatgtgcacaacatgcaggtttgttatatatgtatacatgtgccatgttggtgtgctgcacccattaactcgtcatttacattaggtatatctcctaaggctatccctccccccgcccatcccatgacaggcccggtgtgtcatgttccccttcctgtgtccaagtgttctcattgttcaattcccacctatgagtgagaatatgcggtgtttggtttttttgtccctgcgatagtttgctgaaaatgatggtttccagcttcatccctgtccctacaaagaacatgaactcatccttttttatggctgcatagtattccatggtgtatatgtgccacattttcttaatccagtctatcattgatggacatttggattggttccaagtctttgctattgtgaatagtgccgcaataaacatacgtgtgcatgtgtctttatagcagcatgatttataatcctttgggtacatacccagtaatgggatggctgggtcaaatggtatttctagttctagatccttgaggaatcgccacactgacttccacaatggttgaactagtttacagtcccaccaacagtgtaaaggtgttcctatttctccacatcstctccatcacctgttgtttcctgactttttaatgattgcctttctaactggtgtgagatggtatctcattgtggttttgatttgcatttctctgatgaccagtgatgatgagcaytttttcctgtgtctgtgggctgcataaatgtgttcttttgagatgtatctgttcatatccttcacccagtttttgatgggcttggtttttttttgtaaatttgtttgagttctttgtagattctggatattagccctttgtcagatgagtagattgcaaaaattttctcctattctgtaggttgcctgttcactctgatggtagtttcttttgctgtgcagaagccctttagtttaattagatcccatttgtcaattttgkcttttgttgccattgcttttggtgttttagacatgaagtccttgcccatgcctatgtcctgaatggtattgcctaggttttcttctagggtttttatggttttaggtctaacatttaacctttaatccatcttgatttaatttttgtataaggtataaggaagggatccagtttgagctttctacatatggctakccagttttcccagcaccatttattaaatagggaatcctttccccatttcttgtttttgtcaggtttgtcaaagatcagatggttgtagatgtgtggttattatttctgagggctctgttctgttccattggtctrtatctctgttttggtascagtaccatgctgttttggttactatagccttgtagtatagtttgaagtcaggtagcatgatgcctccagctttgttcttttggcttaggattgtcttggcaatgcaggctcttttttggttcatatgaactttaaagtattttttccaattctgtgaagaaagtcattggtagcttgatggagatggcattaaatctataaattaccttgggcagtatggccattttcatgatattgatttttcctatccatgagcatggaatgttcttccatttgtttgtatccacttttttttcrttgagcagtggtttgtagttctccttgaagagttccttcacatcccttgtaagttggattcctaggtattttattctcyttgaagcagttgtgaatgggagtccattcatgatttggctctctgtttgtctgttattggtatatgagaatgcttgtgatttttgcacattgattttgtatcctgagactttgctgaggttgcttatcagcttaaggagattttgggctgagacaatggggttttctaaatacacaatcatgtcatctacaaacagggacaatttgacttcctcttttcctaattgaataccctttatttctttctcctgcctgattaccctggccataacttccaacactatgttgaaaaggagtggtgagagagggcatccctgtcttgtgccagttttcaaagggaatgcttccagtttttgcccattcagtatgatattggctgtgggtttgtcataaatagctcttattattttgagatacgtcccatcaatacctaatttattgagagtttttagcatgaagggctgttgaattttttcaaaggcattttctgtgtctattgagataatcatgtggtttttgttgttgattctgtttatatgcgggattatgtttattgatttgcgttcaattttttaaactyaggcaactaattatcctgtttctaatgttagtttattgaagaattggctgatttttataaatagtatccataaaatgtgtaacgggtggatttcgtgttgtttaaggcacaaatgaacttaatggacaaaccttatgaagattgtgatgatacgaaaagcataactggaaattaggagatgtgtttttaattctcactaatmctcagatgggtttatgccttattgtttaatatgtagtgcctcaatttccatattcatagaattaggaatttgctacagttattcaccaaaatttcttccttatatattctctaattatttatttcagatattgaaaattaggttagaatgtatttttctgcttatctatttatttttatagttaaaaggtactctaataagtttgtggtttcatttatttgtataaatagaagcgatgctatactcacagtgtttaagaattcacagtgtttaagaattcagagatcttctttatatgattaataacattttattttcaattgggttatttattttaaagaaggatgagtgcttttagcttatgaatactaagactaacatgagagcatataataaccacttattttgcttaccattgttttaataaacatgtaaaaattattmaaaatgactatgatttttttttttgctctcacagcagcatgtattaaaagatgcttttaaaaatagggctctgctacagggaagctaaatttattctattaggtagactaaaacaggcctaagcggaaacgacaaacgttatttgggaaatgctaattgtttgaaaagcactttttgatgaagatgaaagaagagttaagttctatgtttgtaaagttaggagtttttatggtttatagaagagcagaccacaaatgagctataaatgtaasgtagtcttattttgcttctcatgaaaagaraattaaatgatttcggaatttctgctgtgccatctaaaatttggttacattcagcttgtaacattgagacaatcggtcaacaaacatttataggcatacctcagagatattacaggttagtgtcagacatgcacattaaggtgagtccctgtctccactaaaaataccaaaattagtcgggcatggtggcgtgtgcctgtaattctaggtactcaggaggctgaggcaggagaatggcttgaacccaggagatggagttgcaatgagcccagattgcaccactgcactccagcctgggttatggtgtgagactctgtctcaaaaaataaaaaaaaagttatctttacagtatactctagtctattaagtgtgccatggcaatatatctaaaaaaacacgtatcttaattttgaaataataattgttaaaaagtgctaattatctgagtcttcactgagtcataatctttttgttggtagagggtcttgcctctgtgttgatggctgctaataattagggtgacagttgctgaaggttggggaggctgtggcaattttaaaaaataagacaacattgagtttgccatataaatggactctttcgtgaaagatttatctgcagcatatgatactgtttggtaacattttacctactgtagaacttactttgaaattggaatgaatctcaaactgtattgctgctttatcaactgtgtttatgtaatatttgaaatcctttgttgtcatttcaacaatgttcaccaaatcgtcagcaggagtagattctgtctcaagaaaccactttttttgctcattcataggaagcagttactcatctgttcaagttttatcatgagattgtagcaattcagtcacatcttcaggctccaattctaatctagttctcttggtatttctatcacttctacagttacttcctccactgaagattaaacacctcaaagtcatccatgagagtggaatcaacttcttccaaactcttgttaatatttatattttgacctcttttaatgaatcttgaatgttctcaatggcatctagaatggtgaagcctttccaggaagttttcaatgtattttctccagacctgtcagaggaatcagtatggcagctacagcattaagaaatgtattacttttcttttctttcttatttttttatttttattattttatgtgtgtgtgtgtkagacagagtttcactcctgtcacccgggctgggagtgcaatggtacaatcttggcttgctgcaacctcctttcccgggttcaagcaattttcctgcctcagccttccaagtagctgggactacaggcgcscatgaccacactcagctaatttttgtatttttagtagagatggggtttcaccatgttggccaggctggtctcaaactcctgacctcaggtcatccacccgccttagcctcccaaagtgctgggactacaggcatgagccaccactcctggcaagaagtgcatttcttaagtaataagacatgaaattcaatattactccttgatatttggcctacagattggatgttgtatattcaggcatgaaaacaacattgatctctctatatatctccactggagctttggggtgactaagtaccttgtcaaagaccagtaatattttaaagggaatctttttttatgagaagttcatcccaatgatatgtttaaaatattcagtaaaccatgttgtaaaccaacatacmtgaaactacaaagcctgagtgagaacctgggtaacaggctttgtacttccatttatgcaacacaggccaactagatttagcataattctaaagggccctaggtttttcagaatgttcaatgagcattggattcgatttaaagtcacctgcttcattaggccctaataagagagtcagattctcctttgaagcttgaagccaggcattgacttctttctagcaatggaagtcttagatggccccttcttccaatagaaggctgtttcttctccatttaaaatctattgattgytgtagacaccttcattcattatcttatctagattgcctggataacttgctttagctcccatatgagtacttgctacatcaccttgcccttttatgttatagaggttgctttgttccttaaatctcatgaacaaacctctgctrtcttcgagcttttcttatgcagcttcttcacctctgccagctttcatagacttaaaagaattaggaccttgctttggattaggctttggtttaagggaatgttgtggatggtttgwtcttctatccagaccactaaaactttctccatatcagcaataaggctgttttactttcttattatttatgtgttccctggagtagaactttttattttcttcaataacttttctttgcatttacaacttggttaactatttggtggaagaggcctaatttttatctgtctcagcttttgatataccttcctcactaaatattatcatttctagcttgtgatttaaagttagatatgtctttcacttgaacaattagaagccattgtagtgttggtagttggcctaatttcaatattactgtttcttagggaatatcaaggcccaaagagaggtatagagatgggggaacagggggttcattgagcagtcagaacacacaacatttatcagttatctgtgttgacttatataggtgtagttctgttgcactccaaaacaattacaatagtaacaaaacagatcayggaccacagatcaccaaaacagatataataataatgaaaaagcttgaaatataagaattaccaaaatgtgacacagagacatgaagtgggtacatgctgtttgaaaaatggtgctgagagacttgctcggcattcaacttgcaaaaaaacatgctatcagtgaagtacaataaaaaaaagcaccgtaatgtgaggtgtacctgtattgcccttttatttgtatasagtaaacagttttatgtttgaaggtagatgtattagacctcaggtatagtgatcacgtctcaattctgtcttcatcacaggcatgaacttattcatttcctgagactcctgagagttcttctcactctttatcaggtcttcacaaatttgtacgttaagctttcctcctgagatgaagttttgcatctgctaccagctggataagcaattactgggcattccatgaaaaatagaactttttcatatcctttaagagattgttaagaagtaattggccttggaaagctaataccattctgctacccttttgggcatatcttcccaaagggcagaattttattcattttctgagaatttctaatgactctgaacattaggagatggtctctttcacaatgtttttattttttattttttatttttttctaaaamttgaaaacctaaggctgaaataactttcaagatgatagctgtggttcttgtccaggtaagcattttctcaaagccttcctcagaacactggttctgcaggcttttaagtagctactatatatgcataaaaaggcttcctggtcaaataagtttagggaatgttaggataattgtttttttttytatttttttaagacctcttggagactttaatgtgctaatatacttcatgactgacagagaagtgggtattaggtatactttttaataagttgttttaactacgaattcctttttatttgaagaatatttatggaaccaatattccttaaacctactttgagaaatgttggcttccattgaattttccatctaagttgaattacatatttattaactcgtttgatctttactataattctgtgaattaggtactctttgaatgaccattttatagaagaggaawctatgattaacaataagttgcttatttaagttcattcagctagtggagacatagctaaaattcaaaagcatatatatctgatgccaatgttcgtgctttcaggaataccgataaatggaaatcaggcagaagttgatgactgattggatatgggagaccaggagatggtggagctcatgatcaatcttaagtagacgagaatgcagaagaaagagattttaggaaaaagaagaaagccttaagaagaagatcacatttaagctagatgkatctagactattctggacaagggacatgaagataggraataccaggggtagagaatggattgcacaaaggcaaaaagagggagtcttggaattttcatgaaaaacagagggactaagaagagaaatcatagaagtcctatttaaaaagaaaattttggagtttggatttcaacttggaacatggcttttatccgataactattatcagtcactactctaaggaaataacctgatgccagctggacattaggaagattaactgtatcaatgtctataaaaagatggccctcagagaaaaccatcatttaacagtgctctttggccatttgaattattagtgaataggcatgtatttaatttataacttactgaaaaaaatttaaaaatactaatttgttctaaccacaacttttttttttcatatgggataagcamgttttctttttaccaaatatcctgatttattctgtaatatttccttaatatttatctgatctcattttaaggaatttagggaccttttaagggagatatatcatttcaaaatttacttagtaaccttttctataacattgattaacagagtattaaataaatatcttatttaagttaattagtttttactaattccttaaatgccacaattttgcataggtgaatgagttagtggacaaatttagaagacactggggctgagctttakttcagttgacaaattatggacactcctggtgcgatctagaagaaaggcaagtaaaaattccttttcctagaataccaactactttttcccttctcataaaaactttataaaactagttggacaatgatgacatgttctgcctgcatcagagcaaagcctacttgtcaggtctattgcctgccatggacttattaaatgtcactattccagtgttgaggctgattccagtcagcatgttactgcactgaartctttcctcatatgtgaatcraaagttcctattatatagagattcttagtttatagaaagtttttaaagatcaaaagaatttttttatgtgaaaatactttgaaaacttcaaaatactatagaattgttggttattatttatgggagccatagtcattttgtataaagaataccagtcacaaaaagtcacatgaaaagaacagaaaacaaaattcaactttgtccttttttcctgttagagaatttttgacatattttgaagtgtaaatttagtcctaattggatttgcatacatttaaacagaaccaaacttctaatattttgttttctctaacttttgtgtctttctttttcttttattttgtatttttagtgggaggagtagaatcctttacctctacttagaaaaataccatttcatacctactttacgtaagataatggccatgaaaaagtctggtactattactggcacwcagagtagattctcagtaaatgtgggttaaatgtgaaaaatttccttgtagggttatgacaacaaggttrtcacccttgcttcaaatggatgaggccaggatgggaagagaaaaataggtcttttttaagttctttttttttcctctttaartttaataattgtccgatagctaatatctaatgtaaaatactactaaaattagagaactgaattaaagaccaaattaaaaatggtgatttttattaatgtgcctttatayagccttcaagtagactttagcacatatctttaargcacataaaagatagctgctttttgtaactggagcccctcatccttctagagtacacctctgcagcatgacagccatctgctgctgctcccttagtggctgcccctaaactgcccagactctctaaatgttgagtggaagaagagaaaggaacagctgttcgggagctttgtggctgcctctgccctcctcaccacctggcaaatgcacagctcagctcatggagctagcagacacactaagtcaaactgtattcttctccacaccacttgctccttcctcacataaactactaatctcctttctgccatcttttatccttctcttttctgttatttccattcgatctttaggatgctaagtggaaatgggatagggagactgaacagctgtatccagagaggacaaattgtatcctgttttccatcttactatttttattactttaaccaaaaattctttaaaaaacctacatgtcagaaatatatgtaaatacataatttcatagagtttccartcaacccattatgatgggtattgctttttatatgtaacaggaaaaatatggatataagactagtaagagtttctcactttagtcttctctttaaaaagaaacatctttgctgcccataatcagactgatgaatgagagggagagtcaggaatcattgaaatcagtttgattgatttacactaaaaacataagagaaggaaatgaatagattaggagatgaaaaggagggaatagagaaagaagcatgggttgggtttggtgggagattttaagagttatgaaagaagaaagagagtctttggggcagctgcaaaatgagaaagatacacattaaaagaggcgaggagagagagagaaaaaaaatgctttgaattgagaggccttccacggagaaagcatgctcaagagggtacaaaaaggcttttaagaaattgcattgggttacatagagatttatcttttggcattgctgagaaatttcaattaatacttaagttgctttcgaattagtttttgatgtttagacattatgttatagttccatgaggcagctgagttttctgtggttacagtactggaatgtaaaatgtcacatctactttttttttttggagtaaatcatcatctaggacatatattagagtagaacttcatagtgttttacactttggaaatttcacagaaatttgtatttcgttgtccttgaaatattatactaaagttagagggaaattttgttactactctgagattaagagtagccctttggggtgataatctactatttggtattggattactaaatggattatttttaaagttagtgttaaatgattacactaaatcaagacttctaggaagttcctttaggtaactgcagattggaaattggcttttcaactttatctcccaagatgtcagctatgttaagaaacgagataccattcaggatggaggaaggagatgtggcacccatgcctagattgggtgataacctaaayctctgctctcctgactgtggttttatcctatggttagacttagaaaccaccagtactcctaagaatttaaggaattgatggccaagtttggaaaaataggactgtgagttatggataaaatttcccactgaaacaggacagctacgataagctttggagccattgggttggtagtgaaatgaatgattacatggtttggctttaggatgttttcctggagtcaaaagcttgcacaacctgtgcttttgaagaagacaagaagaccacctcactgacctagaaaggatacaacagagtcaatgggggctgtaagtgtaagtctggtttataattagactttgatagtgaagagagaaatacccacctttgcagtcagactggagctcattgacattttgaggaataaaactcaggagctcaggatcctcactgacattttaaggaatagaaaatgaaaataccaaaaaggtgggaagagagaaaaagagatgagagtcagtcagtgtgggctgatagaggatttctgtagaggtttaacagaagaaagagatttaaggatagttgcaagtattagagatattaaaagctgggggccgggtgtggtggtttatgcctctaatccaagcactttgggaggccgagatggatgaatcgcttcacctcaggagtttgagatcagactgggcaacatggtgaaaccctgtctctacaaaaaatacaaaaattatctgggcatggtggcttgtgcatgtagttccagttacttgggggactgaggtgggaggatcacttgaggccaggaggtggaggttgcagtgggtggagatcacatcgctgcactccaacctgggtgacagagtgagaycctgcctcaaaaaacaaaacaaaaaaccaaaacagaacaatacaaaaagttggggaaaatgactttttgtttgctctgtgctgtgaattgagtcttcttttgccatttgtgagtgacatcaagaaatattttaatcacttctcaaaatgttggtgagaatttagtttttaaatattacataatgctgggccctgtctacatggggcattgactttgcagatgttaaacatatttacagatgaggaaaccaaagctcagagactagaaagggcttactcatgactctccagctatagcayttgaccaatactaaagctgtttgcattacacagtggttgcctccatcagcctccatcatgtttcttgttagtaaccattctgggagaagagtggatgagagctaataattgggtgatgagagaaatatatttgggttcaagaccaaaaattgcacttggaagttaagttctcaaaataagagagacacaaatataagaaagaaagcaaaactcattatactgccttaggaaatasaatttttttttaggggttggcatctcacaaatgcgagagtatcacaggcttacaatttcaaaaaacagtgtgtatgtaaacaaggataatgtttctgagttccacattgacatctgattattcaattatgttggtttggttaaattttttttcttaccttaagttcaaagatacaactcatgagtmaagtagcagattttattttattccctatagcagcggtccccaacatttttgggaccagggactggtttcatagaagacagtttttccatggacttggggtgagagggatggtttcaggatgatttaagtgcattacatttattatgtgctttatttctattattattataatacattgtaatatataatgaaataattatacaactcaccataatgtagaatcagtgggagccctgagcttattttcctgcaactacagagttccatctgggggtgatgggagacagtgacatatcatcaggcattagattctcataacaagtatgcatcctagatcccttgcatgctcagttcacaatagggctcacactcctatgagaatctgatgcctgtgccgatctgacaggaggcagaactcaggcagtaatgcttgtgctgctcacctcctgctacrcagcccagttcctaacaggccacaaaccggtaccagtctatggcctgggggctgggaacccctgccctagaggatctgttgtctacccttatagtatatggttgctcaaagttaactgagggaaaaggaatcaccagagaattcgagccagttctgagacagagcttggaattcaatagggctgacagaaractgtgagtcatgttatactacccttgcctaatagagtcagtattcatcagggaacctcttcacaggaagtgctgagtccacaccttaacagtcaggtcgatcaatggtatcagatagtagatgtagtcttggggccagtctgcaaaacagtctaaaaaaaattaaaaggagcctgtttctaaaaaaaatagtacagtgtattctgtgagtgtctaattaaaaagaaaatgaaaaagaagtggaatgttagttgccttgggggatttcagatcacaaagcactcaaagacttaactctgtagaaaaaaagcaaagtgaagagagagttggaaaacacatctgaagattcaggtagtaagatttcaaacctcagtcctgaagatgtagcttcatcactgaccgtataataggtgggaaaatccctaactccttagagatgacacatccagcattggaatgtgttatgatgaatacatggttttccaaattcatcacattcttttttaatatccctttagtctctgtttacagacttactggactgcttgccaagcctgcagtcagtcatgctggaactctctaaggttatctaagagctgtattatattccagccaaaatcagtggagttgcttatctcccacattgatgaggagttcaatgttctgccagtaactatagtaatggttttgatgtaatggtatatttattaaaccaatagctatggttcagtgttggaacattgaacaagcctcattggctgaagccagaaatgtgcatttcttctccagggtaggtgggtgatggtaacagtgtcatttaaaatggtgttttaagttttacttcttaatttcttttgaagwttttattttagaagattgctttaagtcaaaagcaagaatatctgatttcacttctccagacctttggacctccttagagaggcaacctttttgaattgtttgcagtatttttgttaataactacaagtattatacctcaacttcttcatctattaggttattttctgagaatgtgataagaaaggttggaatttgaggatgggcatggtggctcatgcctgtaatcccagcactttgggaagccaaggtggatggatcacctgactctcaggagtttgagaccagcctgagcaacatggtgaaaccctgtctctactaaaaattcaaaaattagccaggcatggtggcacactccctgtagtccaagctacttgagaggctgaggaaggagaatcacttgaacccgggaggcggacgttgcaatgagccgagataatgccactgaattctagtctcagtgatakagtgagactctgtctcaaaaaaaaaaaattaaaaaataaataaaatgaaataaaggtaagaatttgtttacttttgctgtcttttataccctcttccctccccaargcttgctttgtatatttttgagattctgatttttcttctagtaaattttgtggccccagaaaagtatacttaatcctctatttttggttacagctttttgacatatatcttgactccctgtttcattaaaaaatgctaaaatatatatactttgctctactatttcttctcacatatacaacttattttttgtttgtttgttttgagccacacttttacatcatcccattgtgaayactggcattctatcctgtgagaataataaaattttctttttctttgttcctgggttgactctaataggagaaaacaaacatttacattatgatgactgtgtaaacattatttaagttctggactaagattccatttcccacttcaaaatatctgacaccataaacctggggccatttaaaagaggatgttgctggcatcaaggtcacctgaattgtcttctcttatattcagtctatcgcttaacgttctaatgcatttttacttgctttatatttagatttaaaaaattttaatgttgtttccaatcatcattcttttagtttttcttgcaccgtttgtggttatgcattctctctgtgtctttctctgtcttcattatctttgtgggtcttcattcaacccccttaggatgtcacttctgtacctctgtgtctccttgttttcagctttgctggttgctttttagtttaccatgaaactaccctctttctctcctttctctaccattctgggatggaatatcatttcatggattccaggttttcctccttcttagtttacttctgcatgtttggagtgcatcctaaaagaaattcccaggataggtgcaaaggaaggaagttacctcagaaaatgtcttatagatagctttattctggcttacatttcaattgatagttttgttggatttggaaacaataatagaaaattttccatcagaactttaaaggtattactttgttatttttagtacctagtattgtcaataataagtcaaatacctttgtaggaaactaggggtaacttggcatcctccagcattccctgtgcagagcagccatcggatgttgtcatgtagacattcatgtctatctatcagcattggaatatttctttgtattattttatagatattataccatacaaatcttctctggtctttattttttggaattctcttaaccaaataatactctgtgggatgatcctttatcttgctaacactgtctctcatatttatctttttgctttatgcattctacatgttctcaattttatcctttatgtttgtatgtatggttgtattttcctctctagtctctatattacttataacttttaaaagttcattttccttctttggaataattcagtgtcttccaagaccagagagtttcgttttatcttctgtcctctcctgctatgtggtggtacatggtttaagacattcctggggccaggtgtggtggcttatgcctgtaatcccagcactttgggaggtcgaggcaggaggatcacgaggtcaggagttcgagaccagcctggcccaacatggtgaaaccccatctgtactaaagatagaaaaaattaaccaggcatggtggcatgcatctgtaatcccagctactcgggaggctgaggcaggagtatcacttttacccaggaggcagaggttgcagtgagccgagatcatgccattgcattccagcctgggtgacagggtgagactccatctcaaaaaaaaaaaaaaaatcctgtatatttggaattggtctcctctgctgctatgaaaaacgattgacttgtttttgccctagatttctgatctgaaggggaaggcagsccagggattcagactctatgcagatcaaaggagagtgggaaatacttgttggcaggcaaagaggatatttgttcctatgggaagggccagcacacacactagaaatcttactattcccagaattttgttcattttcttaaagaagagccctctggtttcttgcccaggggtaaatgccagttgagtgggatgggtctcccatccttgtcctgtatatagatcatcaatggctctrtagttagactctttattttcagtacagtatttaatctcatttaaatctcataaaatctaaattacttcctatctctgtgtgctgtgtctccatggggttccctttgggaaaatagattgtaattgaagctgtcttgcagtatatttcagtttgtgaattttctacttatttttatctatcaacctatggacttctactttatatttctgatatttattaaaaatttcttgtattagtaatgatttcctttacattttgtataattacatgatctctaatgactttattctctcttgcatacttagactgagaagggctctggagcgatgaacagcaagtcatgagccaggtcctaggccagctgtgtcagtgtggtttgaaagtgacctcatgcaatgttgcctcatttatgaagagggtagttgcctgttggttatgcagacaattagatttagaaaaaaagtgacaaacatcacagaaatggtatttgaatatcatcacaactcattctgctgacattctgaatatatgttctgaaaagccaaggtttggggatctcaactttttggggtatttatgaaagaagatgtgaatcaactagacacctattttcagaaagagtcttggattgtgttgttgctctttcccaagtctggttttcctgagctggagtagccaggggaagtgtcatggtaattcctatgggtaggggtaatggggggaatgccagagaatgctcctgaaatttttagtagttttataatttagtgtcagtggcatacaggtaaaggaagatgtttttcaataagtcttcaaccttccaataaatgggtgatgggactagtgcaaaattattcattgttaccacttataaaaacttctttagagacttcttgtcagtgggtggattgctgtctaggagtacaggagayattttgaatttctaatgtctagtttattttayattcatacaatgaagtaggctattgcagctggagtggcttaatgctttgagccctaaagttataatttaagaagtatcctacctgacagatgtctaggacccatatcccacttcatgctcactyatgcaaggatttttcatccaacactgttctacactgtctcccagtggggaagtacaggtgaactgaaattacaaatgaaattacagaaggccagaacatatgaatatgtaatatagagagtgggcatagggcaaagtattgattgaaaataaacaagatgagaaggaagtagctagggaaaagaaaaaggcaatagacaacaaaagaaaatatcaagttagtttaagaatcaaggaaattagaaaacttgatgtaatctggagccagggaagagttacagtgaaaatcagaatgttctggtcatgaaatccatgtggataaataatagactcaattcaggtgactatggagaaagaaaattacatcttatggggataagttgttcttcaagccctcgttgataactccaagcatttttaaggactggaatttaaaaaggatgatgtctaagaatgatattgtttagatgtgaaaaactggcagacctaggattgacttaggtgcctgtaatttgcctttctgtattcagcttagagttctaacaccttgcagctgataatagagtagattttctttctaaatggatgagactgcatttttggataatttatattgctggcaggatgtgggaaaagacacgctttaccacacattactgagagaaaccacttggccccttctattgtcacagcaaaactgatgaacagttcytacagaacgcttcctccctgagttcwccatgtggtttcattccaattttagtgactctgtgctaacactgctagagaattactggtgtgtcagtatttgactggcagctctgatgtggacacaaagtgtcgttttcttcctgtagtagaatataattaaaaataaaattcactttcagcatttttgtttcttttkgaagaagttcagtatgtcttgggggaacaaacatgtggatacatggagcctgtcatggtcattaaatacccaggttggaaagtacctctgtgcaaacaatagttatgtggcacttttgccagcttcattttaaggaacaaattagagaaacattggcttgtgactacattatgtaaaatacaaaacaaaactagagtaagaaactacccagtctttagatggcccactgatttgagaggagaaacaaaatttttcttgttagatagttgtggatcttttgtgtgttcattggagcagctaaactttggggcataaatggaaagaaaacaatttgaagaagtataatagagtggaattttgaaaagtcttcagagtatggggctgaatcactgctgtttagcaggtgattgacaaaggcattgttcttctctggtttatttattcaggattatgtatcctgattgttttttctttttgattttccttgcagtagtatcaaccttgatagtgattttatagttgctcagtacgtttcatcttggctagatcccaaatccctttgaaatgatttccaacttattaaagagctacaaacaattgtcacaatgctgaagtcaccaaataggctctagcagcaccctttgttttgatttaattttaagattatcaaaatcttatggaagaatcattccctttattttgtagcttgatcaatatttttaaactttaatgtggtcatttataatgaaaatgaaggacaacataaatttttgtagtactttttatcagtttaatgatctgcatataaatttaggaataatcatttacttcaaagtcagtcatttaaaaaatcttctcaactcccaattatatgaagtttaaataatagtctgcagaggtgagagacagagggagagagagggaggagctctgcagttttcttggagaaatgtaacctagaaacccagatgttttgtatgctaatcaggtaaccctaaataacttagttttaaagacttasatcagttccgaattacctgtgttaatagagttttaaaatatgaaagtaatggcttatgtggaaatattttagttttggaatatatatttttctttctgttaacgtaactatggatatgtttgatatcttgaatgttcactttaaacagartattgaattcatgttgggaaggtctaagtaaagaggaggcacatacacactcctgaagcttccttccttctttgcctcattatctctgttctgtttttctttccaactttgagcccctcactaaaactaatataaaacagtaggcaaatgtcttttctttttataattttaactagtttaccaaataattttaatttgttggagatataaacaagatattatttcttccttttctgtcctgtagaagagttgagtgcagattccatagctttctgataatttttggctattaaaattaattcaccatcatttaggacagcaatcctcatatcctctctgaagcttaccccttacatcctccactgtaaactagagatgttattttgtccaatcaaagtatgaatgaggactcatgggcaaggatgatggtgggtccagggttgatagtctctttctggatataacatcttatttttgtctctttatagctgggtgggagcaatgaggatttatacatgagaccaagttcttacctaaccggaggcttatcagtaatggggaaatatctttttattttattttattttttgcaccagagagctaatttatttaccactaaaagcatacacaattaaaaaactgttgtattataattaaaaacacttaacatgaaatctaccctcttaacaaattttttattatttaagttttagggtacatgtgcacaacgtgcaggtttgttacatatgtatgcatgtgccatgtttgtgtgctgcacccattaacttatcatttacattaggtatatctcctaatgctatccctcccccctccccctaccccacaacagtccccggtgtgtgatgttccccttcctgtgtccatgtgttctcattgttcaattcccacctatgagtgagaaaatgcggtgtttggtttttttgtccttgtgatagtttgctgagaatgatggtttccagcttcatctatgtccctacaaaggacatgaactcatcattttttatccccttaacaaatttttaagtgcacaatacattattgttgactatagctacaatgttgtccagtaggtctctagagcttattcatcttgctcaattgaaactttaaaatgttgatgartaatttctcatttattcctgcccccattccctggcaacatccatcccactctcattctatgaatttgattattatatgattcgactcatataagtggtaaccaccattctaaacttaacttctatgagaccaacttctttagattccacataggagtgagatcatgcagtatttgtctttctgttactggcttatttcctttagctaatatccttaaggtttgtttatgttgtcacatattgcggaatttcctctttaaaaaagataaataatatttcatggtatttatgcatctcattttcttttccgttcatctgccaataaacatttagattgtttccacatcttgactcttgtgaacagtactgtggtgaagataggaatactaatatctctttgagaccctgatttcaattcttttggataaatactcagaagggagactgctgggtcatggggtagttctatttttaccttttgaggaacctccatgctgtattccatagcgactacaccattcctcatttccaccaacagtgtgcaagggttccagtttctccatatgcttgccaacattggttgtttttttgataatagtcattctgacaggtgtgaggtgatacctcattgtgattttgatttgcattttcctgattatgcaaatcatcaggaaataatgttgagcatttgttctcatagctattgtccatttgtagatcttctttggataaatgtgtattcaactattctgcctatattttaagttgggttagtttttttgctattgagttgtagaagtttcttaccaattttgaaaactaactcattctcagatatatcrctttcaagtatgttttctgatttcatagattgtcattttactgctttctttgctctgcagaagatttttggttgatgtagtgcctcttgtttatttttgttttcttcgccaatgctttggatgtcaaattcatcaaatcattgcctagatgaatgtcatggagattttctcctatttttttctagcaatattataatttcaggtcttacatttagttctttaatccattttgacttgatttttgcatatggcaataataaaagtgccagttttattcctgtgcatgtggatatctagttttcccaacactatttgttgaaaagactgtcctttccccattgtatattcttggcatcctcactgaagatcatttgaccaaatattcacagatttatttctggggtctctattctgttctattggcttatatgtctgtatttataccagtaccttatcattttgatttttgtagctttgtaatatattttgaaatcaggaagggagatgcctcctgctgtgttcttcttgctcaaaattgctttgctatttgggttcttttatagtttaatataaattttaggatttttttctacttctatgaaatttcyttgggattttgatagggattgcatagaatctgtagatcactttgagtagtctggcattttcacaatattaakccttctaatccataaatacaggatgtctttccatttgtttgtgtctttaatttctttcatcaatattctttaattttcagtatataagtctttcatctccttaggcttatttctaggtatttttattatttgtgatgctattgtaagtgagactgttttcccaattttttcagatagtttgtcattaatacatagcaatacaattgatttttatgttgattttgtatcatttaactctattgaatttgtttgttctaacagtgttttgttttgtttttttaataattgagtctttagagttttctatacataaaatgatgtcatctgcaaacagggacaattttgcttctttccaatttggataccttttactttcttttcttgtctaattgccctggctgggacttccattaccaygttgaatagaagtgctaagagtaggcatccttgcctttgtcccgatctttcaacttttcaccactgagtgtgatgttacctgtaggcttttcatatgtggtctttattatgttgaggtattttccttctagtcctagtttcttgtcagtttttatatggaattgtggttgaatttcatcaaatgcctttctgcttctatttggatgattatggaatttttatcctttattaatgattaattgattttcatatgttgccatccttgcaactcagggataaatcccaattggccatggtgtatgatccttttaatgtgctattggatttgatttgcttgtattttgttgagaattttgcttctatactcatcaggaatattggcttttagctttcttttcctttgttgtatttggctttggtatgagggtaatgctggcctcaaaaaattagtttggaagtgttctctcctcttcagtttttttggaatagtttgagaagggttggcattaaatctttaaatatttggtgtaattcagcagttaagccatctggtcctgcacttttctttgtagggacattttttattactggtttaatctccacactaattaaaggtatgttcagacttcatatttcttaatgattcagtcttggtaagttttttctagtgttttttttccatttcttttagattatctggtttatctgaatataattgcttttagcaatctcttataatttattttatttcattggcatcagttgcaatggggaaatatctttgacttcactctggttcagtctggttccatatgctggtaaccatggctgacaggtggtttccaaatcagtagtgtgctttgcttccttgagttgagttcagcttcaactagcatcttctttgatgaggagcccttcagaaaacagcaggcctatcatctcttggcccttgctattgatcaaaacccccaattaaaacacttttgctaggaaagatgtctcattgcccagtggctgctagaaaagactagggcacctgcccatcatctgactttcatttctttttcacmtggaggtgggaccacccaaactgctaatttctcttcctcatctccaaagggttctggtagccatctactagacctaaatataaccataaccatcaccctaactttttgccttggacctgatgaaactctattataatttttataccactggtttagagttctccagaaattctgcagcctttagaaatttctagcgataagcactttctctgttaatgtacactttcacacatgtgagaaatcaataaatttcakgcatcaggaagttctaaaataaactatcttaccatccttctctgttgtggtagccccaagtatacctgtaggttttgttggtcagcaaatatccacctagratatctttttatgcagctaccagcagtctccacaagtggttcagytggagaactgtccttttgagggaaagagccaaagccactcccctaaacatggctctttcccagaggctgacaagccacagcttgatgcccttgagcccttccctctcagttttctccctaaaaaatgagatttaagaggaagagtggatgggaacttgctcaagtagggctgcctctggcatgtcttggttggccttcaggatggctctctgactcctcttagaatgtaaagtaaaggtagtttttgggaagcycttcccagacctttcagctttaggatttacctggatttccaggtaaaggaaaaatcctactcaacattctgttacactacaatttcttagtatttgcactgttgacatgagaaataatgaatatttttgattaaatatgttttttttttwaaaaaaaaccacagggcaagtagaagttttgatattataaaagagaacttaagaagaatgkttcaaaatatcaagaatttaaaattactgttgatgccgtaaatcaccgaggggtagaatgttatgcctgtgtattatacaaggccagatgcctaagtgcagtgtaacatgaggaagcacacgtaagtgctaaggggcatgcgattactacgttcattataacaggcttctaagctttcaaacatcatatccacatattgtacaatgggyagtacggaaacagcttggatacatttgttataataattagttaaccatatatttctttagtaaatctttgggtcatctttttgacatttagagcttgtttatttaaaacctttgcttatttatttatttgagatggagttttgctcttgttgcccaggctggagtgcagtggtatgrtctcggctcaccgcaatatcygcctcctgggttcaagcggttctcctgcctcagcctcccaagtagctgggattacaggcatatgccaccacaccggctaacttttttgtatgtttcagtagcaacagggtttctccatgttggtcaggctggtctcgaactcccaacctcaggtgatctgccccctttggcctcccaaagtgctgggattacaggcgtgagccaccacgccgggcaaccttcgcttatttttaaaataaattgtacctgaatttcatgtttaaatttagattcttagattatattccacattgaaacttcttatttaatttacattaactgagcatttcttcaacaataaacacttagtattgcatttctttgaacctcaatataatagrcattcctgatcccaggactcccttgttaattaagactcaaaaactaactgggaagccaaccagccattctgttacccataccaaacagtttgaaataaactkggagtgtacacattcctattatcacagaaaattacaaggttttggtgatgcctttgatgcaagtaaatcttttgtgatttatctttatctagtgttttccccaaatactcctacataaagctttggacagcaagacactttatctctctccactttagttcactctwtttaatgacccatccagcttagcagtttatggttttatcatgtctaattttttatattcaccctctgaattatattttcagatatcagggtataggggaataatgttttctaagactgtgtcaattagatgttatttattaatcttaaaagaaaatgccctatattcacattcccatcttaaaatgaaagaaatgaataaatataatttttaaataaataaaatggtttccagtttcatccatgtctctacaaaggacatgaactcattctcagygaactatygcaaggacaaaaaaccaaacaccgcatgttctcactcataggtgggaattgaacaatgagaacacatggacacaggaaggggaacatcacacactggggactgttgtggggtggggggaggggggagggataacattaggagatatacctaatgctaaatgaccagttaatgggtgcagcacaccaacatggcacatgtatacatatgtaacaaacctgcacgttgtgcacatgtaccctaaaacttaaagtataataataattaaataaataaataataaaaaaataaataaaataaaagataattcaagtttaaatgagggagaatctatagctgctgctgttgatcagaccattgtgttattgttttggtaataatatggtatagcatcctggattggtttttattttactaccttttttttttgaaacagagtctcactctgttgcccaggctggagtgtggtggcatgatcttgactcactgcaacctccgccctgggttcaagcaattcttctgcctcagyctcctaagtagctaggaccacaggcacgagccaccacgcccggctaatttttatatttttagtggagatgcggtttcaccatattggccaggctggtctcaaactcctgacctcgtgatccgcccaccttggcctcccaaagtgctgggactacaggtgtgagccactgcgcctggcctattttactactttcgtagctgttttttctgaggaagtacaagacaaaakgtgccaataatggcaattatggttaacctgagtgaaataaagatttgagcaggaatatatatttcaatgtgtggacagctgataggattagtagaccatgtagtgtgtctgtcacaaggaagtaaagctgactaatcaagtcttagataaaagatctgatttctagtattgaacgtcaaatgtttacaataagttcaaattaaagagaggattgaaaaakctcacatgatttcatgggctgctataataatgaaattacttaaaggattatcatttatgtgtatattttcttagcattcctatttagccaacttgataaatatgcatttgattcatttctattgaatagcaatactgtccttatcccattcctaaatgtcatcaacttcagaattgtttaattatttcttgaaattggaatgctagtmcttcaaaatgatatttatagaattattgcagtgctgctttatagcattttgggtcttcttggagaaatctgttatagaaaataatgtatttattatataaggcctatttaccatgctgtgttcctacacaaaaacagtgaattttgatcagtaaatcttatctgtggtgttagtttcctttggtattttgctggttcatttcatctctatgcagagatttttatttatttattcactcttttatagataacaatagaaggctgactaaaagcattcccccctgctgcttgaaatctcaaaatataaacaaacatctttctagaatttctgatccaagaatacagtaatttttatataattttctctattcttttctgagtttccattacataaatcaatgttattcataggttttataagccatatgaaatattagcaatgagttataattagaaatcttgctgctaacctgacttcyggttaaaaaatcagtgacttatattatcactgatatagactaaaaattatgtggatttgaaaacatcactgcccaacattttaatattctgtcatctgaaatagaaaatcggtcatgcctttaaaaaataaagcaaaggcagcacaggttgtaagtgttgctgctgttatgtaagtacagcttagccttctgctctacaatgcaggtttctatctttaggttagatttcaagtggcgatgcatttgtcagtccagctttctcagatcataaaatgatcatgtctgttgacacaattactgatgctgctattcaggactggagagtgattgaagagaatttcaaagagaaaatatatccagttgcaaatggagacatgggtgagtttcaaaggcagtaaactcactattcttacatcgagcctacaattgaaattttcagttccaatttaaagtaatagtttacattcataccaggtggattcctgaaagttccaattcatactcagatttacaggtggaaggacttacagaatcaattgagcattttttagttctgattctaaacacactgtccaccacttttttcccagtataagttgttaagccatctcaaaggtgttttagaaggaactgttgcacaagacaatgtgatctattcaagaattatccagcacaacagtaattgagacgaggtttgaatctgtttgttaaagttggagagcgctaacagcttaccaactagtgtcaaaattaccagtagctggctcagtgtggtggcgtatgcctgtaatcccagcactttgagaggccgaggtgggtggatcacttgaggtcagtagtttgagaccagtcggagtaacatgatgaaaccctgtctctactaaaaatgcaaaaattggcctggtgtggtggtacatgcctgtaatcccagctcctagattacaggctgggatgagaatgaggctgaggcatgagaatcacttgaacccaggaggcggaggttgcagtgagccgagatcgcaccactgcactccagcctgggccgtagagcaaaggtctgccttaaaaaaaaaaaaaaaaaaaagcaaaagattaccagtagctgacacttccttcaagatcagtatcaaacttgttctgactttccagccatctggagcccatttccctatgcacattactcacaccacttataagccatgatttgctctggaaaaacacatgtgagggtgctttgcatcagtacccgtctctctcttcactaattgtagctgctattgctccacctagcttgattcttgaattcctgattcctaaactattcctggtctttggttagattcactactttggtctttgcaatgtatctttgttttcctgattccttaccacttttgatattgaatgatgacttattgctctttgtacaggccatttaggtacagtyagcccttggtatctgcaggttccacatctgtggattcagtcaaccacaggttgaaaatattcagaaaaaaaaggaatggttgtgtctgtgctaaacatgtaaagacttttttttctcatcattattccctaaaaaatgcagtataaaaactatcttcgtagaatttacattgtatgaggcattgtaattaacctagagatgatttcaagtatacagtaggatgcrtgtaggttataagcaaatattacaccatcttatataaaagacttcagaatccatggattttggcatctggaaggtcctggaaacagcatacagaggcatacagaggttgagagggtggctttgtggttaagctacctagattgaggacagctttgccacttactttatgtgtatatatacatgtatatacacatggcccttggcaaattagattttctcactttgtgtaattttcttcaattgtacaattatgatatcaatagggatgttttaagattaataaagaaatacataaaaagaactctgaactatacttggtacacagttgtaagctattagccatttttgctcttcactgtggtacttacatgtacttaactctctgctaacctaccacaaatcataaatgctacctagamttttgatcctacccttccacctttttaaccctgagcttactcaagttgctttatgacagtgaattataaatttgttgaaatgtaccttataaatgtgatctgtgaaaattcttcaaatccagtaacagatgccatatgttagtatgaatttatgttaattttaattctaaaaattattctcttctgatttattattttgtgaaaccagaattcctttataatttatagtttaaaacaaacttaaagtacatctttatattactttttggtattcaccatgtgcctagcaagcacatatatatagtgtatatatataatatacatacatatacacatactttgtcaatatacacatacatatatacgtactttgtcatacacatatgttgccatatttctatttttacagtttgcccaaattctgagcatgcaaagatgaataagatatgacaatgaatgaataaaaagatcttactaagaaaacattaaaacttttttagagctactcattacattggtattagctagaatttcatattttaattctttactcacagtgaattttataataggaagtgttgtacagcaacaatggggaatttccagaaatttcttacgatcgccacttgtggttgttttactaaaactgaaaggaagattgtcacaaaagtgaagatggatcctggcaagatggaaacagaagcagcaaagaagtgccctgtgctggtgtgcgagaaaaatgtacagagacagtaaggatggaccaagagtgattccaaggtggtaactgagcacctgagcccgtctctgtcagatacattttacttttctttgttatttgctatccttatggtaatggatccagagcattatccagtcttaccctaataccgctgcctttgctctcttttaagatttcaaagttttcttcttaaatatactctattgaggagaaaatcgccagcaaggcagtgtgaggtcttctgcacttgccagtgtctgttgggagacagtattccagtgaatatcacaggaagatatccctgatcccttctttaggggagcagcttccccacaggcagctcatttttcagagcaagaatagggctctatcttrtctttttctttstgtttcttctttgtgctgttccttggccctttacttgaaaacaatacttaatagtatatccatatttctttcaagtagttttatgaattacaaataaaactaaagacaccaatggacaccaatgaataagtctttcatttatatctgattagggaaagaaactaaagacaatggaatagaactgacattctctttagaggcaaaatgcatttttggaacaaaaatacatacatttggagtcttttgattacatctttttaaaataaataatctgaaccatgactgacatttacaagactggaggttctctcgtgaaaaagaggaaagttttctaatcaaaattgtggacacatttttttctttttttcaagacggagtcttgctctgtcacccaggctgaagtgcagtggtgcaatctcagctcactgcaacctctgcctcctgcgttcaagcaattctcctgcctcagcctcccgagtagctgtgattacaggmgtctgccaccacacctggctaatttttgtatttttagtagagacggggtttcaccatgttggccaggctggtcttgaactcctgacctcaggtgatccacccacctcggcctcccaaagtgctgagattgcagacatgagctaccacacctggcccacttttttttttttttttttttttttaaagaggagaactgcttctccattgtcactctagtagtgtcatccctgagccttggtttgaggatttacaatagtaggtactaatatgaaaaacacaaaacaataactagttttaaaggcttgactgactttgagaactgaaattattcaaacatgcagctgctttcatgagttatttcatttcatggatacgaagtattttgtctctcattcaagtaactttaaacaaggggataattcttcaactatatgtatccaaccccaagataatttattatttggggaagtaagggtaagaaagtgctcragctgcttttggtttttcagagttgggaatatgttcacatttcaactggatgtttttggtgctttgtagagatagtcattgtacttcattttagtattctgagatatgagttttccttgatatgtccttttacagtcaatcaaatttcttttcatgggcattagcaaatattaagcagaaaatattcaaatgtgtggttcaaagaggraytcaatctgagagcatttgtattccacacatattttaggaagaataaagtgagcatttgcatctgtacaagtaaacaaacactgaatagaaaactgagctaaacagagctataaagtttgaacaacagtaacaaactgctagtaggtgcttcatttactgatctgaagtgtcaaatagcagaaaccctcgtaataaattgttttgctttaaaaataatttgatataagaacaattataaacaataactgracaaattaataagaatatgaaatataacaaatatagtaaatgcaggtatttgtggtaattgttcatttccaataattaatggatctgatttatgtttggatcatatttctgtgtgacaagacagggattctagtttatagctgttcttagcattgtctggtagtgacgcaagataaatttaaccakacactgttggttattctgcctaccccttagcccaggctaygaagatagtctcttggcctgagcaattaatakgaatctcctttcatcatttacgtagtttgcttcttcacatycagctatgagcactctgcaacctaacttagtaccgtgtcatgggatcgactataaattgtaccttactctcccctattcacatgcaccagattaagctttctatgaatctatcaaaaagataaattgcgtctgttttgttctattggtgtttctgttctaaataattttatttatgttctttgttttgtttttaagtgtttctttgagttttaacatcataatttattcttactgctctcacattttcattttgagttataggcaacacatccatcatttccattctaaaaagaggaatttctgtgccacaaattggaatctcaaattccaacttactcttttcttcttrcatttatcctattatttgccaaacaaaacaggaagttctttaagaatgataaatcttaaccatatgatgttagtaatatattagaaacaaagttatgtaatttagtgccctaaaaataacatatrtgacaataaaaagaaagactggaaacaaaaacagaaaatttaagaaaaactatttctgaaaacttttataaaaataattttgtttaactatactttctatctcatttcttcctctaagcagactatttctagtttttgttatataccatgtgctttgccttttgttcttttcttccttgtgactctttttaattttagtttttttgaaatagrgtttcattctgtcactcaggctggagtgcagtggcacgatcataactcactgcagcctcarcctcctgggctcaagcaatccttccacctcagcttcctgagtagctggaactacaggcatgtgctaccacatcaggctaattattattattattattattattatttgtagaaattgggtcttgctatgttatcttggctggtctcaaacttcttagctcaagctgtctgcccacctcagcctcccaaagtgctgggattacaggcatgagccactgcacctggcctcccttattacccttttgcttgatttattattgagttggtttctctaaaacttatctttttgtttttatttttatctacaatttaaaaaaatcttatgtctgtatttacacatttagtaattaaagatgtgccattttctgttcctttacactgaaactaatagcttaaacaattttaggaagcacttaattcattttaaatttcatttctttgagaaaagattggaatatatttttccaaatatgaaacaatgatacattattaaatatgtacttgcaraagataggcattgaaaatgaaaaataaaataaagtacaaaagagtaccatgaacattgggagcaaatcccattttgtatcttytgcaatttggtgagtaatgaaactaactgccctgccactggaaatccaaaatgccttcagctttcctcttatgtttaagtgtacgcttatattttgattgataagctatcattgaattgctttccagctgtatatccatttttacaaacatcatcacctaacaaatctcttgagatgagtgcagtgaaaccatattttgtattgtaatcaatacaattgggtattaggttagcctctaagcattcaatatctgagtctaagttcagattactaccatgtgatattcttaatatattcaaaactagatgtattagatgtactagagggttcatgttatgcattgggagacggagacaggttataatccaccccaagcagagtattacattgagttttattcattcatgtgacgaattcacctttcagaactacttttggtcaaacaaaatattgttttggagaagacaaggtcacaaagctggcattttaatatttcattccattttaaaagtgaaaaaaattagagcttcaacattgtgctyatttaattaaaataacccaacagaatatgtcacatgaaatgtatcagttacatggtaatgaaattatagcaatggtacaccagagctgtacattttctggaataaattttatacaaagaagagtacatttgggattttttaaaaataatttatctgttgtttattatagagatgttaaaatgggaaatagaaaatagaatctctatccaatttaagcaggaagtaggggatacatcacatttattttaggaagaagaatagcagcagctatggtgttaggcagaataagtaggtgagtgaacaggaggagggattggtggtggttgttgatgatgatgattattgctaactatgactattatgcctaccctgttctaggttctttatatggattcatccattcaatactgaaaaatcatttgaagtaaggttttactgatttattttctcagatggggaaattgaggctcagggaaatacatttagtaagttataaataagagacttaaatcctgacctaatttgaaaacctaatgtttatttaaagatgaaaattttcaaagtgccttgtcaatatggctttcaagttatgtagaatgattttatcattggaaactggaaatttataatgacaaaagatagattttcctatttaaagataaaccagaccaataacatgtataaccattttaaataaatgtaattagctaaaatgctttggccaacaaataacacatagtaaatacttaggaattttgccattatacattctattttatatttcagagttaggttaactggatattcaatcctggaaagtttgtacaatgaagagaaagtatatagaaatggattttggagtattagcttgtattgtataattctcaaaagtgcccaaagaatgatagcacatatttgctttattatgtttatgctattatttcctaatacttacaaaaattgaaagttggattatattatctcaagattgtacatacattaaaaatattattagcaccttttttgtgcaaatgctagcttaagtaaaataatatggagccaaagtataaggcatwtttaaggtacatattaggcatggttcctgacttaaagaatagttaaaactaatagaggagttcattataatataggagcataatgaaattatcatacaaatgataccaacaaaattgcatgatgtgagaggagggatggaccacttatgattcaagtgatcggggacaaattaacggacgaggcatttgaaataattcttgaagaaatagtagtgtgttgacagctaggaatggaagaatggtcttcaaagcagaggcaaaacaagagtaaatagagacatgtaaaagaagatgaatacaaaaattgagtgaagcatataattttcatatgggcattttatgtgatgctcaaaaggtagattgggaaagagtgtttgagggcataaagtcaggttactaatgtttattttgctttgtaacctgtgagaagttgtaaattttcattagagaagtaaacaagtaaacaaagagaatgttaagagtatttttatctgtccccgatttctatgtgcaagatggattagaagagaaagaaagctagctacgttccctttgtggtagtcaaggaatggcattatgataaatggttccagcagggccagaaaaaaccatggatggataaaaaaaaaaattacgtatggttgccaatacagggcataaaactgagctgaaaaaaattggagaatcaagaagaaaatgtttaggccaaatggtgaatccatttgtagacatgatgagctttatgtctcatactttagttctatctcacagcgcttggtcagcaggacattggaaatgttctagttcataagtaacaagatcaggattgaagtacagcaatgatgtttaaggccaaggaatagttgggacctctgacaaagacaagtcaaaaaatattaaggataaaaccatgggcagtcataggggaactatcaacaagaatagtgaaccagcattcatgacaagagagaaataatagtgatagtgttcagatctcaagtaaggagggcttcaaaaaagaggtagatagaaaagaggccattagatttgaatgctgatacctttctcgtgagcctttaaaatgaatagattgtaaaagctattttgcatggggaagatggtacaggggacataaaacattgcttctaaaggtatggtgaagaaagaaaaagaatgcagcagttaaagaatacarctatgtcacagatggtattttcaaggcatgggagaccagggatgtttaaaaagcaatacagcaatattatattatgttatattattattttatttaataaatatggtattttattattttccttttttgtatttataattacatctgtatgtcagagtccaggctgtgtatttgagttttttcctctcttttttttctccctcaattagacttgccaggtatctgkaatttcaactggctattccatagaaactgktcttggattttctttttaattaattcaccattattctgtttctaagtcttttattattaattattccctctacttcttatagtattatgtatcatttgtgcctaccctctataattaatactaagttcatttatttttattattttctattttaaaataaaacattgaataatacaaatttttgttataagtacagatttgtgtgtaacacttgagttttgatgcagctttctcattatcttttatttctaaatggtcttaattgcacttttgacctgactaattggaaagagttattgtttaatttctaagtggttgcattatatgtttataattttatttatttctagtttttctacaaagttatcagaaaatgtggcctaaacaaagttttctttaaaaaaacttttaatctattaagaaatttatgattcatttttaaaaatactttttcggccgggtgcggtggcttatgcctgtaatcccagcactttgggaggctgaggcgggtggatcatgaggtcaagagattgagaccatcctggccaacatggtgagacccatctctactaaaaatacaaaaattagccaggcgtggtggcgtgtgcctgtagtcccagttgctcgggggactgaggcaggagaattgcttgaacccgggaggcagaggttgcagtgaaccgagatcactccactgcactccagcctggggacagagggagaccgtctcggaaaaaaaaacaaaaaaacaaaaaaacaaaaaacattttcactctactctggaacttgtcaatttgtcatttttctaacagttttttttttattgctgtttgctttgttgcccataaaacaacaygcaagttatattttcattgagacctgggtgcttggatctagattattcttattatattcttacatttacattatatatccttcataactattgttgataatgtaatcctgttttataatgaactttactcacatttttgtaggtttctcacatgtttcagcaatcacagtcatttcttttacattatggctcctttattggacttctcaagtttgaatttgtagtttattgcattacatattcaggtaatttttcccagtaaagtgtctttaaatgttatattttctgaatgattgtatatctgagagtttctctctagtcctcaaatgtaaaataaaccttgtcatattattaattatgtgatcataagagtttctcctaaaaagtattacgcttctttttattctgcatttgtattgtggcagaataactagaaatatatgtataaacataaactacaaccatttagaaattaaataataacttttcagtaagtcacgtcaaaagtgcaatcaggaccatttagaagtaaaagataatgagaaggctgcatcaaaacttgagactatctttttaaaagatttttactagatgattttgtcaggggtgggggtccttgcttgaattttattgggcttttctttaacttgtaattccccaccaaaataatcttatgttttgtcagttctttccattgattttgactttcaatctatttgcacagatgtttcttcagaaaaaaaaaatctttcctcatatctttgattttatttttctataacagctgtttggatttccccatcagaaatgttaatcatctataattctctcaatagcctctgtcttctcttttcttccatattttccattatattttccatgtctgtattgttttcttcagtggtttgaggaagaagctttatgtggtttctacattaatgatttgattttatacaaactctaccctgtacttcattgttttctatgtggatttaaatttgacatttcacttttagctctccctactttgtttcttatctgtcttccttttcagttaggtttcttaacttttcatttcaacttgctcttctttaaaatgcttattaaatttatttatacttatgattttgaaagtccattggtcccactaagctcgtttcgaagatggcagcccctagtacttctgcccctagtttcagatgcccaaagtcaactacagtcaaatttttaaattaatgggtccttgatgtgttttactcttctctcctgaataacttgctcacactttctacttcttacttttctgctatgtttgtttatattgacttctcaccataggaaatgaggaattatctcctttatatctattttaaccctgttatttacacttcctctcctatcatcttcccaatgtagctacaccataccttacattatcatgggcatatagatgctgctcataactgtgtcacctgttatgctttgattacttttattttcttggaaattttttttgttgtccttatagctagtaaccgtaatttttaaagttatctgtttaaatacttagtgtttctgttttggtttttatataattaaagtttgttttttatatacttaaggacgatttctcccaaactttctaccagaggatatttggatagttaaccagtttatgtcctttttttttttattattatactttaagttctaggttacatgtgcacaatgtgcaggtttgttacatatgtatacatgtgccatgttggtttgcttcacccatcaactcgccatctacattaggcatttctcctaatgctatccctcctcatccctccaccccacgacaggccccagtgtgtgatgttaaagttcatgttcttagagagtctctcyggcttctccaatttagactggtacctgtctaggtggacagcacagcttgcatcctaggatctcccttgactgccgttctgaggatattcttcgcatctttttgtggtrgattcacatcttttttgtggcgtatctcctatttcctgtagccaactccccctcttccttcacttattttcttatttaggttcagcacatcaactaggttttttttttcattttgtttctttcgttctccagaatcttttatgatctatttgttctcgggattctgacatttctgcaagatataaactaatrtttgtatatttttatatgttgtgctggaatctcagtagaatgttttaatctagaatttcatatactttcattctggaaaaattttgatatttttgtttaatgattccaactccctatttgcttttccaygaattcttcttataawtattgggcatgctgaaattatctttaattaacttttttgcttcatttatttctgtatgtctttttgcttaaatttctgggagattatctcagctttaccttcaaattattctattgagtcttcatttctgagattataatcaattataattattatccagaattataatttattatgaataataatgaatgataatgtatcagatatattattaaacataataattatagttaatttattcttttatgctttctgaattttttaatagaaatttcctatttcatgcatctatttttaaaaaaatctctggagttataataactttagatgcctccctctccatgcattggggaaaaagactattttccccaaattacttttctctctatttgtttaatgttgattttgcatggcagaaaatttctttaaatgcccagtgatctttggacttccatttatatgtaagggtgcactataacgctgatttaaaactctttgcacttggatgagtctgttgacagagaacttcattgaaaaatcacctaatatcataacattttgatcttttatgttgctaaatctaaaaattcccaaagatgaatcttcagatcccttgttaattgtgtaaggctggctaatagtattccatgacctaggtgggaaaaaagaactggaaaactcaaaactcaggattcagatttttacttggtaaaactaatttcacgatggtatcccagtaccaactgtgccaggtgccttgcatccaaaaaaccccttgatttactttgtagcaagagttccatttagggttactttgactaaaacatgctaaattcataccaaaatgattatgatgcctcatatggaatgtaatgactagaataatcctagctggagagagtatcttactgtaatgattatgagggaaaaggaatcactaggatgtagcattctcaaaccatgaaacaaacatttaccttattctaagtgtcctgtgagaaccaatcctttaaataaattactaccaaattattttgctgcttctttctaaatctgttttaaacttaccctttcttttctattctcagtgaactgattgcctggcctgactcattcatcccctgctcctgtctaaggcctcccctgactagggccatattcccttcacttggacgattattttaaatgccttatgctgacttcactgtctcctatctcctctgctcccttttctggatgggatgttcctaatagagttggttttcaaaacattttggctacctattattggtcatgcactgccccgggagcattgaggagagacagtaaaatgtgattcagtagtcaccctggactcgaatctattggacatcatttaatagctgtgtgatgtgatgcatatcaactactgttctrtatttctttaaacaaaatatgaggaaaatacttaactcacggggttgttataagcactaaatgttaagtgattagaacaatctgacacatagtatgtcctcaataaatgttattattattactattattatcatctttatgttttgtttgtttactaatataaaatagcttgccactgaaaatattcattccaaacctctttggctatctttaacattctgaagacacgtgttcctgtaaccctctatagattgcattaaatgaacgttgagtcatatgggctaacactgaaatgggtaagtgttttgcactgaacagaacatcycctatgttgttcaaaatatcacagaataatttaaaatgaattatcttwgtttctgcatgcaggaatcaaattagtacatggwaaaaagaaatgtacataattaaatgaaatattctgaaaatttgcagaattgccattagggagtactagttctgagctcattttagtattattaacttctacttattagcaatgaaggatcaatttaattagatttagttatkatraagtactgaccatrtagattcaatgtaattatttatgtataacatttaagtcatattttaaaatttagctgacttttaagtttaaaaacatgaatactatagtacttttaaatactattcacaaaaatatcacattaaaatagctaaaatagtaatttttatggtaaacattcagatgaagtaatcctacctgaaaatatttttttgaaggaaattatttgaaactctaaatttggccatctataatataaacatgaacatagtaacaaaaacataactcaatggmttcaattaaaaatggtcactctgtgatatccaaattagaattatcataagttaaaatttaagggaaaagattattctacttcaatagtcttgcaacaaataccatatgtgccctgcatatttgcatatgcactgtgttggggtgaagccttataataaggttattacatcccatttacccaaaatattacaggtctgacttcctgcacccttcccttaaaccaccgcatccacaatacatacgccaacatgcacactcaagatgccaccatccgtggactcagagttaaggggagaaggcactcttttacgtggctttttctgcatagaasttgagtgaaagatggggcacttcatgtaacaaatatcasaaaccattattaagagctgagattgtcggacgataaaaacaagtaatagcagatctggatgaaatccagagatggtggcttttgactttttgcttctgatataatttttagacagaccagctgtatttaatgatgggtagagcgtggatatcttttctccagtgctcctctcagtcctaataaaggaacctgcagagtttctgtcttccacatcatctgttcataaaatactttgaaggccaggtgcggtggctcatgtctgtaatcccagcactttgggaggccgaggcgggcggatcatgaggtcaggagtttgagaccagcctgaccaatatggtgaaaccccgtctctactaaaaatacaaaaattagcagggcgtggtggcgtgcaccttagtcccagctactcgggaggctgaggcaggagaatcgtctgaacccgggaggcggaggttgcagtgagctgagatcgtgtcacctcattccagcctgggcaacagagtgagactctgtctcaaaataataataataataataaataaactttcaaaatattaatttgttaggtcttccaaacatccttgtgaggtatgcggtcagggtacttagtctcctcaaaattagcttctctgaagctgcggatgacataatctagagaccacacagatttaggaaacgataagtttagtactcccatctgcctactgcctaaagccaggcctactcaaaacactaaatagagagaagttatacatttctagtcatagactagtttatcacatgttctatttattaatcaagttatatatttatcaaacatggaactcctactaagtcctaagtcttatataggggttgggtggtccttgagattaatgtgctgtcagtctggtggggaaataaacacatcaacagataatcaccatataatgccaaagtgttacaataaaaatatgtcttggaggaggatgaaatacagaggaggaacatatctacctgtctggagcaaagtagataagagagacttcacagaaaacttatctcatgaaggtaaccaaggcccctaaattttcaaatcctatggttatgaaatattactgtcttcatacattgccaactacttcatcattcctgaaattaactatttgattggcctcttgcactgtggactagattcttccctagttaccattwgatcatgtttttacatcgttttccactggtcttcctgagtgtgcttcttaaattgactctttccagtgatccatttgtgccatcttctctttgtatttttcatcatgtctgtgggagagagctctctcataaatattcatgacctcaattgccttgcatatacctgtgcctttgaaatctttacctctaggcamacttggctcacaaacccatgaactaagtcatgatcggcctttcaaaaccagtcattcccttgtacgccccttttcagtgaaggataccactacctattcacatggcattttagtctttcttcattcaktcaaaaatagttattgatgcctattaggtcttagtcatgatgttaggatctggaacacagtggtggaaaatcagacctgacttctactcttcttaggaaaataaacttttaattagtggcttagcaaagtacagttcattacttgcatgtgtcagaatcactagaggaaggagggattcttttaaacatgccaacatagggttctttctcaaacctatgagttgtaatctctaagaaygagaaatatgcattttaagtaaacccttaagtgattcttaggaatataacctaaaatttaaagcccactttttaaaataaaaataaaatcaaacaaatacataatcatrtactgtaaaagtccatggaagaacactaaaaggactaaggaggattgctaaatgatggttgcgcattgcctgggagttagacagggacaagatcatgcatagatgtccatgtaggctggtttattggatttatgtatgcagtggaaagaagtgaaacactaaggatggatgtcaaatcagaaaactagatcccatcttttcattcatcttttgcccttactctaccatgatctctgttgtctttactgtatctcaaatctatcctatcttcttcatcaccaccacttagacataattcrcaaagtcttgctttgcctgacattatggcaatatttctctaattcatattcttgcttctctgccatcctccctctgatctgtcaccacagygatttctctaaaattaaaaaataatactatcatgtcatatatttgcctaaaagtcctttaattactcaccacagctttaaagaataaagtctggaaactwgatgctgcttacaaagcccttcgttatatggtcactgactgtcttrtattgatacacaccatgttctaatcatgccatattgcttacagtgattrcartgtacatttgcttatrggattcatccaacctgaaatgcctttctttgtcttctccagttccattttatctttcaaggcagtctyacctcccctgagaaactttttacccctgtgctgatgctgaagtgccccagctctatgttcccctagtatcctttgcatgactctttaacatcacttgtaatttttataatcattactgattaattgactttctgttccctggactgtgattctatgaaagaagaaactgttttattcctttctgtatgtacagtccctagtaaaaatccacgtttattagctgacaaatgaggtatcttttgactatgctttagtaatacaaatgccgaccctttagagcctaaattagttttctagggttgccataacaaagtaccacagactgggtggcttaaataacagaaatttattttctcatagttctggaggccagaagtccaagatgttggcatagttgtttttctctgaggcctctctccttgacttttagatggttttctccttgtgccattccatggccttccctctattcatgcctgtgtcctaattctgtcttcttgtaaaaacatcagttatattggataatgtcccaccctagtaatcttattttactttaattacctctttaaagattctgtctccaaatacagtcacattctgagatattgagggataagacttcaacatatgaattttgggaggtacacaattcaacccataacagaattccttagcactaacgaagtatttrgtgattagaatgctacgatctcaagtagctcttagctccaggaatctttcttgtatgtacctttgtacctgataatctgtatctaacaaatttagatggtccttgaagaagcagctgatagaatactcacatttttcccatggccattgccattcctcagattcctgtcatcatctttcatctggaattccgcaacagcctcagcgtgaytgacttctctctagtcttggactcctgcagtcttctttctacgctacagtccagagattctaaaacgtgactcatcatctttatcctggctatatccctatggaagatcccaactaccttcaggatggcatccaaactcctctcaatggctcacaaggcccttcatgatctcacatgtaccctctttcctggcctgtttcttgctactccatccactgcttttatctaccttcctgctattcttaatacttttagttcctccagtttgtcaaggctttttgaaactatatattagtaattttgttttttgcctgatgtgctgttgagctcctcttctgtgccttgtctcctgtgcaacctccagactgctgtctgcacatccatgaaccctgggcttcgtggtcctgctgtgtgctcctctagcagttccatttcctcatccttctgtaagggagactcactgtgagctgtgattggcctttgtttttttctctccccatctacgttgtgtctggagggcaagaaccatgtcttggtcttgttgaattctcacattgaactttgtgccttaaacaaaatgggcatggactatgtttttgtacagcattataggacwgagtcttaaaaccacttgaaaatatctacttaaatagtctccacattttttaaataacagctttatagagataacttacacgccaaaaatgatctctttcaaagtatgcaattcagtggttcttcgtatattcacagtgttgcacatccatcaccaatatctaagtttagttcattttcatcatcatccaagaaatcccataccctttagtggtcattctctatttccttccccctagctcctggaattcaatggatttgcctattctggatgttatatataaaataaaaacatgcaatattagtattttgtgattagctgctttcatttcttagtgtaatgttttcaaggtccatccattttgtagtaggtgtcaatacactattccttttgattgctaagtaatatagatataccacattttttatcctttcatcagttactggtcatttgggttgtttctggttttggggggtattatgaataatcctgttatgaacatttatacacaaatttttgtgggaacatatgtttttaactatctttggtatatacctagaagtggaattgctaggtcatatcaaaaccctatgtttagctttctaaggaattgtcaaattttccaaagctacagtaccattttacattgccacagcaatgcaragaattccaaatgtcttcatccacatctttatcaacacttgctattgtctttattttttattataatagtcctagttggtgcactggttttgatttagatttccctgatagctaataatgttaggtatattttcrtgcactattgacaatttgtatatcttctttgggacatgtctattcaatttattggctcatttgtaattggattattggtcttttaactgttgaattttaacagtttttaaaaaatatattctggatacaaatcccttattagagataataatgacttgaacatatttttgcctatcctgtgggttgtcttctaacaatcttggtggtgtctcttgacccacacaattatttaacatagatgaagtgcaatttatttttkttgttgttgttgcttctgcttttggtgtcatgtctaaaaaacactgcctaacacaaggtcacagagatttactcctgttttcttctatgagtttttaagttttagttgttgcattgtgtcttggatcctttttgagttaatttttatatacagtgtgaggtaggtgtataacttcattattttgcatatggatatccagttattttggcatcattttttgaaaaaaaaaattctttattgaattttctttgtatcttgtcaaaaataacgtgaacatacacgtttatattataaatgtgtatgaggtttatttctggactctctagtctatgccactaatttgtttattattatgcctgtactatgttgtcttgattatgacattctttgtaataagttttaaaatgaggaaatgtgaatactccatctttattctttgctttcaaaattttggctattctgggtcccttatatttccatataaattttaggatcagatgatcaatttcagtgaaggagccagctgagattttgactgggattgtgttgaatatgtatgcagatcaatgtgggaaatattgctatcttagcaatagtaaatcatckgattcataaacacaggatttcttttcaactatttatactttttttttcactttttttcaatgatgttttgtagtttttcctggataagtcatgtgcttcttttactaagtttatcactaagtattttatttttggtgttaatgtaaatgaaattttttccttaattttattttaaattgtctttaaaataggagaagtcttcgcacttttaaaggttatatagatctggaacatcacaaaaaaacaggatttcagcttgggaatcatctcaagcatattagatttttcaaaggacacgggccactttgaagaagagataaatattgttttctttgtggtcacttaaagctgtacatgactcaaaggaaatgcagaatattaagaaatatatatakagagagacacatataatgcatataattacataattttatattctgttatcagattaactgtgcaacatgtactcattcatgtgtgaatcatgtgatatgcaaaatatggyactaaagtttaaaattttaagtacccatgcagattgtatgcatttatatgaaatttaatgagtaatggtttaaaaataatcattagtgtctctggaagtaattgcacatgcagtcttccattacttaagtcagaaatattgagttttgaatatcgaggtgtcaaactagtcaacaaaataattattaattaataataattaacaaaattattacatgtagagcaagaggaaatgtgttaagaatggtatgactaagtatcagttatctgtaaacaatgtatttaaaattttcccacatcctgtatatggtaagcacattaaaaaaataccacttgatatttaggaaaaacattgtattagagatattagattgagagttctgtaatgaagactgaaaattattaattataatggggattttacttgttcaacattcttgtaatcattcttgtaatcctttcttcaggagttattaaaactatacagaagaaaattattctctaaaaattatattctttttaaagagtttataaaacagtactcctagttgacttttctgaaaagattgaaaatttaaaaatgtaagcacactcacccrgaaactttggtttcacgattctttgtgtacttgtctgcaataataacaggatttgacagcagaaaccagctgatgacttacattttctgaaatgcactggattgaaacctattgaataaatcactattggtaaacattgtcaagataagaatgggccatttttttgtccctggaagatctatctatataactatcctccatttgttataccatgtatttcagactgaaaacgtcttaataacagaataataccaaaggtgaggaaggcaaaytttaaaaatatatggttaaggcatctctttatacttataatgaaagatggtataatttgttaatatagcaataaacagggttgaataatctttgtttatgctttgtaacagttgtggaaattaggcagttttcactttcaaatagtgttttttttgtttgtttgtttgtttgttttttttgacggagtctcgctctgtcacccaggctggagtgcggtggcgtgatctcggcttactgcaagctccgcctcccgggttcacagcattctcctgcctcagcctcccaagtagctaggactacaggcacctgccaccatgcccggctaatttttttgtatttttagaagagacagggttttaccgtgttggccaggatggtctcgatctcctgaccttgtgatccgcctgcctyggcctcccaaagtgctaggattacaagcttgagccaccacgtccggtccaaatagtgttggttttaatcatcatttagcaactatgtaaaataagttgttagtctcaaatattactgtatttgtaagatccttgttcaagcatttgttatttgtcctttcttgaagtggatactagttggttttcagactttagctatgaaatcaattcacagcatagtttaacaaagattccttgatgaaaattaagtcatgcatatttagcakgcatatttaacatatttattaaaacataatctgtaaactataacattacagtctcctttataataaaaatgttacacatattgcttatttttttacttaaagaaaattcatagctgttaaaaaactggtatttttcatattcttacaactttatttttaatttatgaaaaacgttttttcattggttcaaaacattaaaaaattgtcaaggaaaatttcacatttagcttataatgataaatagttatcctatgtaatgaaacctaccgagtataggtacatttcttttttaacacatcttatgttgttctgagaagtaaagcatattgagaattaaagcttccgacatgtggttagagaaactgrcctttaaggtttcttgaagtttaatgtttccaatttttttttgctgtttttcattttttgttttgttttgttttgttttgtgttttttgagcaggaacactgtaaatctatggaagttcccaacaaaatgcaattttgtttctatagtaattagcttttaaatataaccttcaaaaatgtattttcttatcttatgagtcccttaggttgtaaagttaattcctgaagcacccagtggagcatttcattttttttctcagtatttttgaaagaaatcactgtgtgcttccatttacctttatttctttcttcctgtaatcttataagtaaataaaatataatatttttaagtcattaaaacccaataagaaactagagggttataatagattacatttcctttgtagtgagctgacaggatagatctaatagtctcaaatgccctgatgwcatatgacagatgaagtagcatctactttctcaagggaggatatctgaaattaaagacacaaagtctctactctgaggagattcgacagccctctaaaaggatagagcttgaagactacagttctctggcctcaaccattcaccctagattcaagaaaggaaagcattcttaagtaattgttcatgagaacgatttcagtcacctgattgtcaaagagtaagccaccataagaatgatgaaggaatattgctaaagctacatacttcgggctgctttggaagtatacagtcgctgtccctgggtgtgccttctggatagataactacactgatattaaaatgaaagtggccaccaagtagctaagtttaatttgagctgcattcattttctgttgttgcagaacaaataactccaaaatgtagcagtttaaaacaataaacatcatctcacaacatttccgtaaatcagaaattcaggaacaggttagctgtgttttcctggctcagggtctctcatgagtttgtattcaagatgtcattcagatgtcacctgaaggcttgactggagccagatgatgactttctaggtggctccttcacacgcatgggaagttggtgcttgttgtggacaggaggcctccattctttccacagggctgctgagagttttcatgatgaggtaggagggacttggctctggaggtgggacttggacactggaccaaactgaggactagctaaaacagggacaggacagaagcagcttcccgtaagacatgcccaccattgccatggcagttacagcctctttccatggcagcgacctgcaacctagtagttattacctttttcctagaaatttctgcataatccaccccttactctgcatgcaattgaaagtaggtataaacacaattgcagaactgccctgagctgctgctctctgcctgctgctcctgctctgcaggaacagtcatggagctataattgctgcttcaataaagctgttttcttctaaccaccatcagcttgcccttgaattctttcctgggtggagccaagaattctggcaggcttggtcccactttggggctcgtctgtcctgcatcagtgacactggagtgcttccactcgagtgaattatccagcagagagcaaggccgaaaccaaaatgccttttatgacctggcctcagaagagacgtatcatcatttctggaatatactattgtttacacagactagccctattcaaagtggcagcgggccacaggagtacatcaattttcaraagtgaggttattgggggccacggtggagactgactaccacacagtatagtaattcttttggattattagtaaaggcgaacttatgaaaataagttgttctttttttctgaaacattccttcatctccctttgctgtgcctcttgagtaccctctatttccatatcscagtacttccaagctgtctccttattcctcagggctctgctctagtgcctttcccatcctttctccctcatgaattcaacaaatatgtatcgagggcaaattgtatgccagtcactgtttgttcacaccagtgaaaaaattactcacttcatagagcttaccttttatagtagctgcttttcatagtaagtggtctcccgtcatctgtaatwttcagttttgtcctattagcattctgcyaaaattactgtgtctaataagaaaagcaaattaaaggtaagagatcaatgattggtgctgtctctttcacgaactgcttgtatctcgatagagttattctatgatttaacctgaaagcataaggttggattttaaggccctgaagcgatactaagcaaagtggggaaaatctcatttgtactaatttccctgctttaaatcaccatagggccactttcgttcagtaaaaaaaacattaccatcaagttatctcattcagcatggtgttttgcacaacatrgaaatgcaagactgaagaaaaaaaggatatttcaagcctaaacaggggcaaaacacattaatatagttatctccatgaacacatgaggaaagtcagagattaactcattttkccatttcctttcaaaattgatgcagtgtgatttgaatttccctaagtatggtagaaagacatggatcatcttttatatatgtttatatcctarcccagtgtttcagggattctggcatttatatttgtgattaactctaaagcatctttctacggggcttcttmttatttttttgtattttattttttttagttttaaaactgttttgaccaataaatctctctccagatgtcacattggtcagcaatgaggaggtaaatggaaactaatgacactcatcaagttgatgaggtgaatgatatattggatccagtcacttaacactttcataaagtcaatatcaggggaaaaaaaacgagactcttattatggtaaactgtatttgtactgtcagcattctgtgattcattacaaacccgtggctaggattaggatattataaatgggggaaaaatggaaggctcattaattttttatacccacaggtggaagacatgcagtgggctcatagagaacatactcacscggcgtctgtctgcagcctgcygtgtaagccaggggagaggaagaaaacggtgaaaggggtcccttgctgctggcactgtgaacgctgtgaaggttacaactaccaggkggatgagctgtcctgtgaactttgccctctggatcagmgacccaacatgaaccgcacaggctgccagcttatccccatcatcaaattggagtggcattctccctgggctgtggtgcctgtgtttgttgcaatattgggaatcatcgccaccacctttgtgatcgtgacctttgtccgctataatgacacacctatcgtgagggcttcaggacgcgaacttagttacgtgctcctaacggggatttttctctgttattcaatcacgtttttaatgattgcagcaccagatacaatcatatgctccttccgacgggtcttcctaggacttggcatgtgtttcagctatgcagcccttctgaccaaaacaaaccgtatccaccgaatatttgagcaggggaagaaatctgtcacagcgcccaagttcattagtccagcatctcagctggtgatcaccttcagcctcatctccgtccagctccttggagtgtttgtctggtttgttgtggatcccccscacatcatcattgactatggagagcagcggacactagatccagagaaggccaggggagtgctcaagtgtgacatttctgatctctcactcatttgttcacttggatacagtatcctcttgatggtcacttgtactgtttatgccawtaaaacgagaggtgtcccagagactttcaatgaagccaaacctattggatttaccatgtataccacctgcatcatttggttagctttcatccccatcttttttggtacagcccagtcagcagaaaaggtaagtagaaggaaatacacttgacaactttttcctggatttaacatcttcttttaggatgcttttcctccttttatttggttcacttatattctctaaagatgcttcagtctgtgctattcttacttagcatgcatatatatatatatatatatatatatatatatatatatatatatatatatatctccatccgtcaaggtcacattgctttgaatttgtgttgacaaagcctgattttccatgaaaaacactttaatgtgtcctccttggcaaggttgaagattgacaaagctcacatcactttctgagtctcccttcccagctctgctatctgctaacatcactgttcttttccaaatgttaattaaaagaaggaggaagaaagggcagacatggttcacaggggtgagctgtcccygagatatgccactgcatgacaaatgccttcttttttgttctaaagtaactctgggataaagccrttgcttggtaattgtgatgattttagtcatggaagcagagtttatagtgaaataatcacacacacgtataaaaactgaatggcttcgttcagtctgaaccatcttactatttcttctcagtccccattcttgttactttttcatatgtggaagttgatgatgagggtaaagaaggcaatcatggacaattatataaagcagcttataaattttagaaggcaaagatcaatggactcccccaaagtaatttcttttgtcactaatctcttgttaatgttttccacataaaatactgctggtaaagaatatctgtataggaagggagtgtttgctgggttggatgttgtagttctatgtacagaaaagcagagaactaagggaactctgaattccacttttcgggtagtgggatggagataaaccagcttgaaaaacagaggagaatgctgtatttctgtaatgatagcccttctgccctgatgggcatgtgagagagtcctttcagagtgaggacttgattgttccatcctctgacaccagaaattgtgagaaaaatgaaacgtcatggggtaattacatttcccaggctataacattccaaggaggttctgcatgacccagcagaaaatcccagcaaattcacagaaaatttccacaacaacgggacagaaagctcattagtatgagtattcatcccttcctcaatcaatgtggccttcaactatttttggacaaataatgtacttcagcaaacttgctgctgaagagaataaacttgtgattctattaaataggttttttgaaggaaaattttacaaaataaccattttctctcagaacaataacattgcagagttgtagaggccccctgaggagcagtgatgaagataagaatttcacagtgaaatggacacatgaatatgccagagggtggaggttgccctgtgttgctgagactgtgggaggtgttcatttgaaaacctgggggttatgcataattttatgggtgtctatatagctatgcctatgcagatatgattgagtgtggcttgcaaaattcctttttctttcttagctttctgaaatcaaactaaatctaagaagcacactgaaagacacattataaaatatgttaatggattcattttgtatttataatatagttgaatgtgaaaaaggctaaagaaatcaattaagaaatgctaactctaggaattttgagaatattttagagcccacaaattatttagtcatggaaatgttgaatttaagttagctctacatcaagggctatcatattataaatagctaagattttggtactgaggtacttcacattataaaattttgtattatcctaaatctacatctgaaaatttgctacctgctattctctgtccaagtttcttttattattcaagacaatacataaaatgacaagcctgggaaacataacaagaccctatctctacaataataaaaataaaaaaattagccgggcatggtgtcrtgcacctatagtccaagctgttcaggaggctgagacagcagggattgtttgagcccaggagttcaaggttatagtgagctaggatcatgccactgccctacaggctgggaagcagagtgagacctggtctctaccaaaaaaaataaataaatgcttgagaatgtttaagttttcacattgcttaaattattgacatgaatattaaaaatgaacaaaacttgtatatctctataagaaggctttaaatgttgtattgaccttggaggaccaaagagctggtcagtcctccattttcttttgtactgttcagacaatcagccccatgttatcaacttgaattgtttactacagctagctagcacacacatccattaacccagcagctcctyattgagcattgtgtccggcattgaactaattattgagcccatgtcagtcggcttccctgagcctcctttgcaaggctgagtctggctcccagcccatgccttcatgatgcctgccggcaccagcaaggtgccaggctcaaagtcagaaaaggatcaggctcaagggcgggggaagatggtgaggggtcagatctgtgatgagaaagaaaacaatagaactgtgcattctgcagctgtgcattggtgacaccgaatttccaacatgtagaagagcaaaatgtcttccagtatgcatttaattgtttcttctcagaataacgtcagagaatgcatcgaaccacacaggtctctctgaaattacaagaagcaagaataacaactaaacttagttgaaaagtttagacagatgttttggaaaacatttgggtaaaatgaagttataaaggacacttgtagcagttatgaagacagagagctttctgaagtgcctttattcaatgatatatcatttaacttccccacattcctttgtcctctgtttttgaatgaatcattttgaatgaatcaagatgaatcatttttcccaatagattttaataacatcatttgtaactactgctgaattcaactaaattatggtataaatgcacctttggtttccctatagaaaagtggtgtgaaggaagggtagaccactgaggcatggccatgcaataacacaaactcacataattgtactgaaaagagaaaaaaattaaaatgtgattaatagtcaggagaagtatccttagggatggtaaggggctgtaaggatggcagaaatctctaaaacacatattttatcatccttaattgggctcataaaatcgagataatcagacaaggkttatgacactgtcaacctccaatgagcactctgcctcttctagagcatccgatggaaacaaaacaaaacaccctcaaagtggaaaagaaaataaaactcaaaaaggcaaaaaaagaaaagaaaagaaaaaacctccaataaatctcaaaccagattttcttccagtggcctcaggatgcatagcagcttaagtcagaaagctggttgtcaccttagactcctccctctactcactcctgcccctttactttacttcctcttcttacttttaaaagtcatcgttgttgtggacaataagcaatgtctgtctgaatgaatatgtctcttaacatatagctcttcttatagtccattctcaataaatgcctattcaatgagctaatattaatgatataataatataaatgcgtatttgtgatttaagttagactatagcacaatgggaatcttctgtaggcatcttattgtaatctccattataacaattttttttttctgaaaaaaatggtttcccatttaatgatgggtcatgtagatttttttctaaaaagttgtcattatcacttattctcaaataggactactacatgtttaaagagaagagcaagcaagaattattatagttgtcctttgtttcatccagaattcacaaagcaaaggagaattgatgcaactattgagatacttttgccatatcacccctcttgttctttttctctatttatctaccttaggggcagaagagtgtaggggtacacaggtgkgccagtggagtaagaaagagcataagctcctgaatgtgaaatcttgggttcaaatcctgtgtctgctaaatagctgagaaaacatgggcaagtggctatgtatctataggtggtaatgagttycccctggacaatacaaattccaatacaaagcaatgtaaagcaaccccctgccatcacccccagccctgttctcgaactagagragacttgagttcatatattctggggaaaagcaggaaaagggttgattatttaaaataaatacaaacacacacacacacacacacacacacacacacacacacacacacacacttcttttgtctctgtatggtgtgtttttttgtactaataactcatatttattttgctgaaagttagatgacaggagtcatgaaaagtgtttcatgcacrtaataggcagtgaataaatgttggctatcatcaccattaggctgttacccatgagggcaaggactttatttgattttgctcaccattttctyttcagcactcagcataatattgagtctgtaataggttctttaaaaaatatttgtttaatgactgaatatattygaatgaattgcgtaggaggatgtgatttgatttatccaagtaattgtctcaatttcacctgccatttagaccatatctgagcagacccccaactgaaagtgttttcttattttgttgttgttgttgttgtcgttgttttttgagatggagtcttgctctgctctgtcaccaggctggagtacagtggcactacctcggctcactgcaacctctgccttcagggttcaagtgattctyctgcctcagcctcccaagtaactgggactacaggcacacrccaccactcccagctaatttttgtatttttaatagagacggggtttcaccatgttggccaggatggtctcaatctcttgacctcatgatccgcccgccttagcctcccaaaatgctggattacaggcatgagccactgcacccggcctgaaagtgttttcttaaacatagaggcttgcccgaagagtagatcttacagattacagcagttaaagagggctgtgagggagagaagaatctggagcatttggagagaggacagagttgttcctgaggcagtgtgtacctgccttcaaatatttaacagacaatactggaagaaaaaaaatatcatcagagagcagttgctgaaatctttgtattataatttggaatgtgaataattctaatattcgagagrtagtttggagattagtaataaaattcctgctctaaggaatagtccagatgagaaaagaacagcctgaaaatcctgcggaaatagtgtcaataacctggacaaggatggaagagatttgcagaatagatcaaactggaggaaaattttcagctgtaccttgtctcctgacatttctccatttccttaaaggagggcagtaaaaatgattatcagtatccacattgtatgtttgtaatcgttaatcactgcatataactatcttaggctacctgttggtaaactatataccattttcttttcttttcttttctttttgagatgaagtctcgctctgttgcccaggctggagtgcagtggcgccatcttggctcactgcaacatctgcctcccaggttcaagcgattctcttgcctcagcctctcaagtagctaggattacagatgtgcaccactatgcccagctaattttgtatttttagtagagatggggtttcaccatattggccaggctggtctcaaactcctgacctcaaatgatccacccgcctcggcctcccaaagtgctgggattacaggcgtgagccaccgcgcccagccaactatataacattttctttccttgtcagttcacagtcatttgaagcagatcctttttaacggtgccacattacagaactatttaatgtattayggtcgattttttgtggacaagatcaattataccagactgttgcaatctgcyctggaagggggaagtaaattttaaaaaaactggaaaagaaagcatttatgtggcctcatttatgctcttaatttaaatgatatgcttgtgaagattcagaggaagcatggaattctcatgtagggcacatgcaggcaggactgccaagtggctctcctagggaatgctgccttatataagtttttgtttttgttttttctgattgtgctacatattaatcctgcagaaaattaccaactttaacatttggaggaattcttttgggggaagccatcttctttgatagcacaaataaatatttgctcaatgaatctttttagattacacatcctacttttgggggttctgaggaagctgtggggctgaagattacttaatttaagtgttgattattagtgacattgtggtatttttcaattgaaattgagtttacaaacagtttgaattctctgcccaaattacaataatttatgcarctagaccactggatattcagcctgggaacttagagctagagctaacacatcgaaatggttgaactttctgaatatgattgaaaaatcctgaggtactagatttgattaagactgaaatgtgaatattttcagatttcagtgaccatgactttatgttaaaatgctttaggagaatatcatatacacaaacctaatcttttctatacagacagaaccttaatgacacccaggactattgataatacagaatgtagtgactgatttacttactatgattttgtaagacactttttatgcttcagtagatgcttatctctcatggaacatacagggtgccaggaagaacagattgcaagcaaacagttccttttggctgtaaccacatatatatatattttttatgttgagaaatgtaaaagaaaaatctaaatgtggtatcatatgggttagtaccacctaccttaaagtgtggaaaaaatatttaaccaagtattaatatatattccgggctatctaaaataaattcgaaacagatttatttgaataattaaaagaaatatgtaaaaagaaatttaatctggtttctggttcaagataatggctggcacaaagacacatgtatgtcctccatctaaggtaacaagtaaatgacaaaaataatgagattttaaaaaagaaagaagactagaaggaaaggagaaagagagggagagagaatgagaggaagccattatattgttagaacaaacatttggtaaaactgagaaactctcagaaagtaaaagccagttgggtctgatttatggagaaattcaaagaagggaagcacaacccaagatgcataagtggttcttactataaaagtcccaaataatttccaaacctaaagtcaacataaagtcctgaagcaggcatcagagtgaccattagggaaatatttaaagaactgcatttcaggagatatgggccagctgggctcctcacttcccctttctgctccaaccttaatgtagaaagagttccagttaaaagaaagaactctgaaaaatgggaattatgtgaggacagaggacttctgtacctataaggcactgaaagagaaagggcaggattggaagtgattttatttcagatatggccagggggaataggaaatacagctctacctaggataagaatataagtttctcaactcttagaacaggtttctcctggggtaagttccaggctgcttgcttgccaatatccatgcatctttaagagaagcgagccaggtaaaacaatcactaaactcacaagttcatagtcagccctctcaaacaaagaaaacagaccccaccagtaatctttgtcatgcaacctggtcctcccattataattctacatcaacagctaaggatggcaggattaactgcagaaaacccagagcagaattttaaaacactaaaaaagaaacaaaacagcattaactgactcaaaaaaaaaatcccacaggtaattcaggaaatataagaaaatgttcttaaaaaacaattttaactagcattttaagagtgaatcaagaaaatattgaacacagacccatacacacacatgcaagtggctatggaaaatatcagtcagggaataagcatatgatcccagaaactaaaattatgaatgtgaaaataaaaagctgaacagatgtgctgaaacatagaaccagagcagagatctagagggcaaaataaaagtcagaaccagaaagaaaagtgaaaaaaaggaaaatatgaggaaaaattaagacatgttgagcataaatgcaagatcccaatatatatctaataaacatcctagaagaggaaacagagacaaagaatggaaataacctaaatacaaaaacaaaacagaaggaagatttcacaactgaagaaagaaaattcttaaaattgaaaaaatggaaagggccaaacatcttagtaaattttcactaattgacagaaaattctaggaacttttagaagggaaaaaaagatacctacaaagaatgaacatcagatctcatgtgcctccttgaattctaaacagaattgagcaaagtctttcttgaaggaaccgtgttttaaacttaaaattctatagccaaccaaactatcaatcaatgttaggctaaaaatgtaaatggcccagaaaatctgatgcctacatatctacatatgaattatccaaaaaaaggcatgtcagatatgagacagtaaggcagtggcaatcacatatgatccagaaggattttttttaactttttgtttaactcgagaaaggatatattagaccctggtggttaatatattcacaatatattcatatatatccataatcctttaaaaaccaggattttaataattatgcttactccttttctgcaagtccagttatgctacctgaatgaatctgaagggaataatatttagtagccataatatartaattgctttttgaattgatattacgttgttagaaggaatctagaaacaaaatagagaagtattaatttatctactaatgtaagtaatgtaaatattatacaaacaaatattatctactaatgtgagtaatgtaaatattatacaaaccctgtaaatcaaaaatagtaatataaattttaaaaattgaggggtctggccgggcatggtggctcatgcctgtaatgccagcacttcgggaggtcraggtgggcagatcgctgaggccaagagttctagaccagcctggccaacctggcgataccgcatctccactaaaaatacaaaaattagcctggcatgattgcaggtgcctgtaatcccacctactctgaagcctgaggcaggagaataacttgaacctgggagatggaggctgcagcgagctgagattatgcgcactgcactccagcctgggtgacagagtgagactctgtttcaaaaaaaaaaaaaaaawtgagaggtctgtgaaaagggacaatagagaggggacttgtgcaaacactaaatcactcatctttttctgtgagtagccaatagatactatctaaaattggtaactcaagagatatgagtacatkctttacacaacaggaaaaacaaaacaaaaaaacattcaaactcattaattctatacaatgggatcaggagatgtaagattattcaagtataaatcatcgcatacagaagaatttaaatgaaagtctcaagaaaaacttttctaagacaacataaaggtacattttcatattaggggcttttgatatataataaatttttaaagaaaatctttgatgcaggaatggatgaatgattttgaatttgtaaaatgactcaaaatctttggttgacaaaaatcctttttgaacgtcctcttctttaggtttaatacaattgctaaataaatacttttcaatggccacaatttaagtgtcagcttatagctgatgatggcatttcatcaaaagtatttattaaatgtttgctttatgcaaaaacctttgtttggtattcagaaaaatgcaaaaatgaataagaagtcatcagatttttaagggtcaagtcagggggataataccaagcacagargtgactggtcaaggcagagtaagataatggaggtgaagttcacagtatgacgtcttgggaccagggatggtgaacggatgaagaaactgtccatgaaggaagtgggaatttaaaaaggcctaaaagagggaaaggaacagatgcaaacagcctcctagacaatagaaatagtgggtttacactttcagagaagggaaagttgggcattgtttgtaaaacctgtgaccaaaaacctgttttaagtttargatagccacaaggagaactgggaggccacatattccttttttccttgttaataacacaccttttccactgaaaaagtattttccagtgtgggcgaaaaattatatgattactataaaacaaggatagtcagataattgggagtcattttatgaagggatttatgccatgtttgtacttcatttgctagggattcgagtatatttaacctttttgagcatgaatatgttctcagtaccattatattttgggaaatttctctgccagtggagagtctgaagagttgcaggggatgtggataagaaaaaataaaataacaagtttgttgaggaaatccaggcaagaaatattgggggtttgacatgtggcggtggaagtggaaaggagaggactcatttcaagttgaattgggaacagaagacaatggaaaatgagatgtttgcagtttatggcatgtgattgtgcttgtaatgtgcaaccttctttggggctgctacaaggtttctacccaattggacttcaaggaagagtcatagctttctctctggtctggactaaaagagcaaaccagtttttaaatggctaatgactgcatctagacaagtatggagaagaatatttgggctcaaaatagtgaaaattgggtaaaaatcaatttgtgtggataaaagcaaaagtaaagatacacagcatgagtatctggtagattatgattttgagtaaacaaatctgctaaataatgtggaaatgaattttgatagttgaaataaaaggcacattcattagaaataaaagccaaattatttgtaaatgatgcatccaatttaaatatataatcagtttattatataaatttgaaagttaaatggattttatattacaatgtgcttgggcaaattttagagtaatctttatttttactatttgtcatggtcatgaccaaattcactaaatatttttttctttaccacaactcagttttgtgtaattttgagtgccttgcatataaaatcagaattagtcaattttcaattattctgttgtttttctttaaaatcattttttaaagtaatatattgagtccataaggtaatccgcagggttctgtattttggcagtgttttgaatcctgttaacagggactagttttcaaccaatcaaatagcatccacactaattgtaggtttttgtgggattttagaagaggaattaaggttaccattttgaaaaaaaaaatagttcaaaaattgcaatcagttgaatgttttcacttggaattttagactctctatgttatttgttcagtcaagtgtatcttgggaaaaataccaagaaatgtattttcttttgtctgttggcttaaatcctatagaatacagcttcctctataacctttttgaatatacactaagactcaaattacacacacgtatgtacttatagcttctgcagaagatttcatgttctcagataagattaaatgtcatatgtttctcctggcagctgctttctctaaaatcctcatctactcaaattgaattgaattgaaaatagtattggtagatagtgagcctgtcataaacccttaaagtgtttacatcagcaggcagcttatcactgtagtgctgtcctttcttcaacaaaacattttccccatgctaaaatgtccaatcaaatggcaatttatcgaacacttggttacactgcctatttattgttaagaactgacaataaaaagcacgaaataattacattcgaaatacaaaagaagaatatgtatagaagatggcaagaagactggcaatgagtagagggagtcactaccataggattataacgtacatgtctccaaagaaggccgtcaaattacctgtttccacctctcttattattttatatattttttatgtatagcgcaggcatagattggtgattgctaatgatatgtcctcattttatatcttcccctcccctgcactctgggaaaccacattgctttgaatctttttgtttctttgtcttctttatctcatcttccttctgttcaagttgccccattttggactttctcccaggcactattcccttgacattctcatcattcacatatctcctgctagaaaagytgcattcgtgctttcctcactgctttcttaatctctgcccttttacgtgttcaaaaatgtgaactaaaacaatccaaaactgggatcagaaagcaatccaaaacccaaattgtgaaattaagctatctaaaaccccaaatgtatcatgtttaaaatggtcactattcattgaatgtttcctatcatgccaaatcatgttatttatatttaaaccattttcttttctctaaacttctttttagaataataaaaccttctttttagaagtttagagaaaagaagttaaacttctttttagacttctcttcttttttcccctgtttagactctgtcaacaaattacagtgtttgtttgaaatttctcctagatctatgtttttccttctcatttccaaggtcaaatctccttttgtccataggtctcaggcttaaaacctaccttatgtttctctgttatgctcagtgtctattttatttcctcctttctatrtcaacattatctttgtctttcagagatccagacttggaagttgacaccgacttctcttctttttaccctgtttagactctgtcaacaaattatagtgtttgtttgaaatttctcctagatctatttttttccttctcacttccaaggtcaaatctctagtccacatctgggtggaatctgtttaattttaagatgcttattttagaaaaaaattgctagctacataagcactgatcactgtactcgaaagtgacttccagatttttgccataaagttcttgcacaacacttcttctttgtcacttcttttagatgagatcaggcacgttcagggtggtatggccgtagactgccacttcttttatagttactcaatcagtccatttttgttttaacaccgtcattctgctgaatactaacagcactgtttgagccagaagtggcctgccatcgtggagcttgaattctgtagaagagacttttttaaagggataatttagttactcagtaaaaattgctatgtgtactctcagtggtgctattaagggttcttaaagtaaaattaattcctattgactattagctcaaatccaaactttccaaactttattaataccactttcattttgttataccactcttcatttcagtgaaaccaattttcttatgaaatcaactaatccatgaaatcttccctattaatacaasttctaaacacatatgtgctctatctggatgtccattattttacatttccagatttgtgttctgtgttgttcttcagttatttatgcaactatggttgtatttccattcagcgattcctcaggaagagatcatcataattyttgtgcattcttcccaactctcacttcttgccagccccacaatccaagtgctttgcaactagttttcaagtacaaggtttttgttgaaattgataaaaagaaaagaaaaagggataaacatttttaagccaattctgagttaatgtgttctaaaaagtgagttaaagttaaaagtaaaggaaatgattggcctggtagacaagaaattgagattcttttctcattaacatatctgtggacttgattaaggaagttatcttctctgaatcttgtcctcttacctcaagtaagatgagaacttgactaggtagtctctaagggtctgtttaattctaagatgctcttattttagaaaaaaaaatgccagctacataagaaatggtcarctactcagaggcatgacctaatttttaagcaaatgcacatgaagattattatgcatattcagtgagagatgcaaattaatgcaggaagcattttagaagataaatatacttaaggtggattattggtctcataaaccttaatcaattgcattcacatcaacatagcatgatacaaacgtatgatccagaatccgaattacttttcccaagagccctatggggtatctattgataaccatatgtttatgttttatgagctatcttaggcagaaagagaaaaaggatgcccagtactcagtactttacattaatttataaatttcttgctctctatttgcaaaaataaaagtatagcccacagcagatacctctcagtatatcagattttgctagttgaacattacctaacttttctgtggcacattctactcatcattacttcttgtttgtcrttcaaaatgtttttcctcttatggaaatacataagccacaagctggaagactgatgtgaccccagaaaagttattgtgtaaagtaatctcttattagaaactcattttttatttcgcttcacattagcgagttccttatcctcttctaccacgttttcctcatactgccagttaatgtagtatcataaattgctctgcctcaatggctaaaaaagagggaaggacattgtgtctactaagcagtcctgtcatgacaaattgtaaagtgttggtgacaagaaccagttaagttcccttttatgtctttttctcttgactcttcctatggaacctaagaaaaagccaacactttaaagtacttttgtaattgggaacaagaaaagctgtaattttcttaaaaataaattcatgatagtttaagacttaattcaaatayggaaaccatataggtgacgagttctcttcctttggttgaaaatcctatggggcaatctatctaaaataattatttcccttagacttgaaaccttcaaaagcaggtgcttttctccagaatcttaattccccaaactcttatgccattatccaggagctctatgaagatattagtgcaagttgaaataagttttgattattttgaaaaataaaggccatattcacaacacacataatattttatataatcaattttaactgatcacaatgtgtgatagttacaaactttacactgtttaacataacaacttgagcaattaaatcacattcagtttaattgcatggaggcagcatggtatagtgtttataagcatggatgtagagactggatgcttgacacaaattgtggtttgggcatgtactaagtgacgtggcatatattcccactctaagcctcagctcgtgtctgtaaaatggggataaaaacaatgctcagcacacaggattggtttgagtattgactaagactcctgcttcttcttactcgtttgttggtaagtgagatgacgagtcttcatttkccatactgaccaacctaaatccctttggcattctctaaactctgctgtccctacttttttgctgatgcatttggtcacttgagaaatgttaagtttatattcttgttatgtaaatctgcagtaactatagtacctataagcattgtactcttctggtgtaaaactggccctaaacagacacaaaatgtttcatattttcatgtgatttaatggaattgagcccaattatttaatatcaattactaaattgttttgtatttaaagtaaaattatttttatgaccrtaatatgactaagtagaaagagatatgttataacatgatttgtttataagacttttttttctattctccacactctaataacatagtctgtcaagaaatctttaaatatgtgtttttttaaaagaattcatatatttgcagtatttgattaaaaagcataaacaatttattttctggagcaaaacaaccatagttgaaattaactttgagatatcttaaatatcttagataaagtaagatatatacaagtaacagtattttctatttggtccacttatactatgaattcctaaatcatggcttatttctcaaattgcctcccatgttctctttcttagaatattacactaatttaaagtggtgccatgtaatcaggtattataccaaagggctctctttcttgctgctatcctactggaagcatactttctgtcaggaaatcatagatgcttgcttagtttaatttcatgcaatagcagcatgcttctttctgatttctgttggccaaatatttattttgagtcatttaaaattctgaaaaaaaataccttctgcttctatttgaaaccattccaacatcaactgcagttgtatttgggtctcagttctccataagaggtcttaacagatgatcccacaaattctttttcagttctacagaggaacaatgttcagggtttcctaggatagggttgctagacttattaaatagaaatgcagatgttatgttaaattttaatttcagataaacaatggataattattttgtgtaaatgtgtcatacaaagtgrcatcctaaaatataattatctgaaattaaaatgtaactggatgtcctgtattttatccagcaactgtattctaggttgatgagagtagattgataagatgaatcataaacaacaaacaaaaagttggaatactgaaatacttgctataagaatttaataaaattctacaaatacatttaaggcataaaaacattaatcatacaaatattgcttaaattagaataaaatatataaagtagaccagtgttccttgaatagatggcataaaattcaacagtaaatagttgtgttaagcmgaataagggcctcccaaagatgtgaacattctaatcaccagaacctgtgaatataatatattaaatgtcaaaaaggaattaaagtaatagatggaatcaaggctgctaatcaactgaccttaaaataaggaggttatcctaaattatccggttgtgtctcagatatggaagagggaggcagaagagtcagtagtgcgacctgagaaagactcaacttgtcattgctggctttgaagatggaaggggccatgagccaaggaatgcagaaaacagcctctaaaagatgaaaaaggtgagaacacaggttccgctctaaggcctccaaaagcaatgcaatcttgctgctaatttgattttagccaagtgagacccatttggagccaagttttgactccaaaactgcagggcagtgactttgtgttgttttaggctgctgagtttctggtaattttgttataacagcaataggaaacttatacagtaagtaaatactgtgtacattattgatttagatgactttttgtataattttctactgtttttagacatgacatacaatcccttaagattatcttataataataatgatgattttaaaaatgtgtttaatcttaaacatttttcaaaggatatgaatgtacaatttgaaacatggcatattaagctgatatactatgcattaagcatcctaattcacatttgatcatgtgtatagtaaatgaagatatataactttgaagaaaatttgcaaaccaatttcaattatgatatatgatgaaattaagatatagccattgcaaaaacaaaagaacaaaatccaaaatacaagtcaaatgaaagttgtatattttacataccccccaacacacacatttatatcagatactcgtgtgataaatatgggagaccttcatataataattttaaagaaacaaatagattataaggattgcaatatgtaattataataatttagtaagtgtactattgctagtacaatacaagttgagtttgctagctcatttttaaactctagaaataaattcctatcaaacattcaatgtaatactaaaaaattcttagaatttggttgatacagaaatattaacccctccaaataatatttagaattttaattagtacaatgagaatggtaatgaacaatgcctagagatatacatttttatctaaaatgtattatctaaatatatattcttattcatctctatatacagtttttatttaattttataagcattgatattttcttgggtgtaaaatgttttaaagtcatattcaaagttcctcttgccgtgtgttatcttcctgtattcctgatcttatatagttttgcattctctgtcctcaaggtgttgagtaaaagcttagagaaagagaagaatacacatgctaatgcatactttgaccacagttatacaaagatcatttcataaatattcacccatttttctgatagtaaaacagtttcatggaatttgtgagttgtaaaacagggatttaaatgcaagtttggttttgaagcctaatgtctccaaagtccaaattgtttaagccatacccactgcttcattttaagcattcactacagctttattgaactaggctcctataaaaccacatagaaattggatgcatcgtccttcacatggagtaatatcagatttcttgttggtatcccaattgcaagtcaatgagagaaacaaaaacagatggaccacaactccagcrtctgcggacttgctggggctatttaagtcactaaatgctcatctccataggcactgggatacttattttcctcatctctgtgtttcctgtacccagcactgtgcttgacaatataataggtaagcaggacattttatttgaagaaatgaacaaatgcatgattgcacaaatgaggctgactctgttctctctactttgtttctttttagaacctgatgattaaaattttgttcttgaaacacctaaaaagaactccgataaaaagctacatgtaggcagttttcatttatgaagagagagtaattcagtgtttggtagtatacacctctgattataatcaatttggaatcagtatttaatctatttaggctgatggagaattaatatagacaaacaggtctctaagtcctccttctcttactacccatgttctcagtatttctaatctctctttatttcataacctaaaaaacaggtttcacttgacttcagtcctacttacctaagtataaaagtaaggagagaggtgataatgaagggaaatgtatgctgtgtcaacatgatgataacagacagtagagcaaccggaagtggaaaataagctgacattgtgctgatggtgttagcmaagactggaaagtggctatgtatacaagtttcttccagttgcatwgtgcagatttgctagtgcccactgaacttcctaagaagtcctggtttaagaaatatactaacattaggtagagccagtgatggaaatgaaagctatctagtttaactatcctgagtttcaccagcctttggtgaaatatccgtgtagtgtttgctgtttttatcactacacatgcttgtcctgggaktcttaaaaaaaaaatacccgaagggtcaggtaagaagaccacacacattcattctaaacaatatgatcttactgcaggttttaaagcatatggattttaraaattgtttccatgactctttttttttaaaaacaagagctttatttcttaattgacagactttggtacaacatattagaccaatttttaaagacttatttttaaaagcctacagagaaaataattccattgtctgaaacatacaggtatccagaaaagtggtaatgataggaaaactctaggctttttatagttgacattttgaaacaaaaggatatattggctctgccatttgtagcttttggtgttgtggtccatgaaaataatggtctgtcttcaatctatcaagtcacagacaatgagctataatctggcttttgttggtgtctgaattttttcctgcctaagagatggccccagtaacagcacctatttccagggcagttcccttcctgatggaataaagacattttggagtggaataaactccagcaggtgtagcaattccaagtcattcatctcagcactattcccaaatctttccattcaaccttatatgcatggtttggatggtcaggataaacattttcttattctttgattttgcttttgaaggagtgctgaggcagcctggaaatgtccaaagcctcttatacctgtgtttcagctgtagattatgatgtctgtggagtttgtatcccaagctgggggcatcaggcagagtcacagcctaggatttggagcacatactggatggttccgttttataccacagagggattgatggtgtgagcaataacggggaggccacaagaggctgcagcaccatttgttgagaggtcaggtgtcgagagtgtggctcagactggcatacggcaccttgttaaccatgttctcctaccaggaaatatgggatctcatttgaatcagactatcagggaataatatggaggtctgttctgagcctatagggaatctgcacaaagtagccaccagcacagttaataatgggattgcctgggaactctctctttccagccatagctgaatataccagttgatcaggtcaatcttattctctaacttcctctggggaggtatacagtgagtctggggaggtatacacaatggccaattttcatcctctctgctgggggagaagggaaacagatctgaattgctatgtttctctcctccaatactggttattaatctataagcagaaaatgcctttcttaactttttgtttccatagagttatcaagatccttaattttgagactcagcttcctacaccggctaattctctgccttttcaggacttaaaagtttgttttaactcagtyttctatgtgttcaactttcctttagatccaaccccacatatgattttgcaactaatttattttacttttattttttctttggcctttttggcattcttatgaactttataactcacagccaaactctagagatttcccattggatctctcatcactttaacacttagagttttaccaaattggctgaagaattatttccagcagtaaccatacatattttctcgacagttttctaaatttacattggtgcatgccttggcctttgtgccacatttaaattcccacttttcctagtacttgttctgattaacacactgttaacacagtcattcattgaagcacatgctcttcatctccttggtggtaactttcctctggtaactagccttatgataacttgccttcaatggaataaaagacataacccatagagtcaccctcatcacaattggccttggagggaagaatgatttgaaaaccacaagaggtatataaaattgccatgttgtctatagatttgttgaggatgtttttattctaaaattctcaaggagatgtattgctgagatgatataattcaaattaactttccttcagtcatgtcaaagttcattatatttatgacttactcaggctcagcagctgttggaatttgatataggtgtaaaccagaagtggtgggtgatcataccatagcagaccataataaacagcacagccctgaaattttcactgagcttcgtcttagtgagtctcccaactaygtgaagaccatgggatagctgctactggcagtactgatctccctacaacccactacctgcttatagatatctccatagagaaaaagaaaaggcagacttctcaatatgtagatgagtatgaattgtaagaatatcttcagatggcttcttacctgtctgcttcaccaacacactttgaccatgactatgtaagagccaggtttggaggatgtggcgctaatgagtccaaggccactgattaaatctccatgtagctctattgcaagccctcaagctagttatctctaaagacttacttctaattttggtcaaaatatttcacaaatatgtgccaatgtcacatggagggcagtgaaggaatatgtgcagagtacagtgtcagcactgagagagctcttaaaagacactgagtccaattactcactaaaaagtgatgctaaccaatgcatcagttcagatgatgcctaaatgcctccagtaactagaagctctttatcttccaagctaatgtataacatagttggccataaaaaattctaaccctcttccacgtggcaatcaatcaattctttacatatttgagggtagccaccatggttctttgaaatttattttcactttaaacatgcttatttccttcaaaagtccttcagatattctggttttttycattttaaatgttcaataaatccctcttgaaatctttgacaagaatgaagcagagtatgccaagagatattggactagcacaggtcagttctctcagggaactagattagatagatctcttaatgawtactaygatcacatcacatcatcttttatttggaagccatatcaactcttaaatcatattgagttcattttttttttttttttgctaaaacctatgtgtctttaaagtgtacttctgctgagccatggatagtgtccartgtcatttgtatacttttttaaagctcataaaatattgctgtattatttagggaagaacttagaagagtcttctttctgccaaaagaaatgtgcagctatagattaaaagcatgccgcaactttgtgaycatgttgggaatacctcattcwtatccttcccagagggaactcagtattgctacaggtgcatgtcatctggacttgcagacaattttacctttctttctaatagacatcatgtgtgcatgtgtgtgtatgtgcttaaagcttcctcttctggtattgccggaatgacaacaatgggaataattgtcctatttttcagatcttatttgcatctatgaagttctatttctcacctgttatcatcacaattttattttatttattacctatgtcctatgtgtagaggtgtctgaggtcatttaggacttttcctgcccatttctccaatattttctcctaaatgtctaggtatcatgatgaactgtgcaatcagatggtcctgatttcaaattttatctctatcatttgctagctctgagaattttagcaagatttaaatcaattaagcctcattttaaaaaatctgtgtaattggaggtgataattacctacctcaaagggatactggggcattgaatcagataccttcaagtgcctgggatatagtaatcattcactgatttgtaataatacttttattattactttgttttaaygtgctttctacagtgtatttgtcttcataatgtgctcaatttgtaatttatttcacaactgaatgtgggcttttattcatcactcctctccacgttcaatttatttatgtgcgtatcagccattacctggacaaatatatagtttctgaatctcaaaaataatgacctttattgcctcaagtgtctgtctttctggtgtcataagccacatcccagaagtcaaaattccactatgtgatattagctatgmagccaaccattctcttgcagcaataacctacctatttcgatattttaaccatattgaaaatttaacactttttggaagaaaaaggtgttaaaaatgtttatcctaaaatattcacttttctgcccctgtcttcagagttccaatatgcttttcaaatttattctgggcatcatttgtccctcttgctcccaggaataattaggaaacagtagcaattagcaaatgtaagtgactgcatccaagtatatgttatggagagacaacctttttgtaaatcacctgggtcagatctgtgtagaaccactcctggtgatgccctccatttataattacgttggtacttgcaaacacagttgctgtctgacatggatctactaacagtactgatttatgaagtgtgacagagcttcatatattttatgccattctaggattgaaaagttcctctaaactcttccttatatacgtcattcattcttcaaaacacatgctagattatttatttgagaggcaacccagttttcctaactaatttacctttcaactcttattagatggctgtgcttgacaattataagtataaatgtttggaaggatcatttataacacatttattgcttctgctgaaataagcttttctctaaatattactgaaaaatacaacaaataattttactgcactaaaacaaatctcattcatttattgttgccatggttggaatgtttgtcacctccaaaactcatgttgagatttaattgccaaagtaacagtattgggatgtggggcctcatgggaggtgtttaggtcatgaggttccatcctcatgaatggaggaatatcatttttaaatgggcttttaggaatgggctctctcttttgtcattctactttctaccatgtgatgacacagcaagagggcctttacaagataacagctctttgatcttggatttttcagccccccagaactgtgagaaatcaatgtgtgtttgcgtgtgtgtgtgtgtgtgccagtgtgtgtgtgttttgataaattacccagtctgtggtattctattatagcaacacaaaacaaactgagataataatatmcaaaaatataatatacaaaggtataaaaatgtaatttaggccagaagctgaagttggaggtgtagattacttcttcaatcataattaatgaatactctatgatgagggtttattgaacatcttcacttgttgacgttctatacttgtcctgccagtgcaggtacttactcattactttgagtaaaacagtggaaacatagagggtttcgaaatgaacagaggggatggggagagagagaacccagaccccagagatgattggactaatagaaatggagttgttgttgaacagactgaagtcatggaaaacttgggggagggccatacagggaattagggttgaagatgaggtgttagggggtatttagggccaagttgctctaaaagaatagacaagctcgaaaaagaaggaattgttaataagagcagatgttccattcaggccctgggctgcggaccttcatcaaagggaagttgatactttaatgttgccaatagtgaaaggcaaatacaaattagatttcagagaaagagaagacttcaggagtttagacagaaaaaagtaccagtaaagaatcaattattaaagctctactttttgcaatttggcaatatggataaattcacccaaagaaattataatttattacaggtcatagttatgctaataacaaactctaattgattgtagatgagaaaaatgatatatttgtagccaatatttgttaagtaattactaagtgccagacactgctgttcatgacacaagttcatcctcacactgacaccataagacgtgctatttttattcaattttataaatgagatagataaattgacatctccagaaaggaggtgatttgcctgaggtcacaaagataggtgagtgacagagctgggatttgaagacatgctgtctggcttctgacatcatttctttatcagaaagcatattgccacaagaaaattacttgcrgaaagtaaaagtaggaggaccacttatttggctgtaggtgatttggaaggcttcattgagagcctctttagattgccacaagaaagcatattgccacgagaaaattacttgcggaaagtaaaagtaggaggaccacttatttggctgtaggtgatttggaaggcttcattgagagcctctttagatatgccctctccttgcatatctgtgacatattttgtatgccctgcctatgtaatttactgcattttattttacatatcagtttgcatctgtgtcttcacccctagattgttatttccttgaagggaagagttgcctttcagttacatacatatcctgttgcctagcagaggaagcacagagagaggttgaagaaatgtttctttttttctttttcttttttttttcttttgagacagagtcttactctgttgcccaggctagagtgcactggtgtgatctcagctctcggcaacctttgtttcctgggctcaagtgattctcgtgcttcagcctctcaagtagctggggttacaggtgcgcaccaccatgcctggctattattgtatttttagtggggaaagggttttaccatgttggccagactggtctcaaactcctgacctcaagtgatctgcccgcctgggcctctcaaggtgctggggaggaaatgtttattgaataaattattgaggcttaaatgatgagtataattttcagaggtgggaaggggttttctgggaaagaatagtcccttctggaagtttgcagtcagaataggcagtagatctaatgtccacatcgtgaaggtaagagttttgtagggagtacatttgaaagaagcatcataaagtcatgtagggaaaacctaaatgctcactgatggatgagtggataaacaaaatgtgacatatatatgtgtgtgtgtgtagatacacgtatgtctacacacacacacacaatcatacgtgtgtatacacatatacgcagtggaattttatccagccttaaaaaagaagaaaagcctgccatttgcaacaatgttagatgaacctggaggatactatgctaagtgaaataagccagacacagaaagacaaatactgtatgatctcacttatatgtggaatagaaaatagtcagactgaaagaagcagagagtagcatggtggttgacaggggctaggaggaggagaggaatggggagacagggcaaaagatgcgaagtttcagttatgcaagataagttcttgacccctaatgtacagcatggtgaatatagttagcaacacctattatatacttgaaattttctaagagcgtagatcttaagtgttctcaccacaggaataaaaaagagaaaatattaaatatgttaggtgatggatatgttaattagctaaattgcggtgatcatttcaaaacgtatatctatatcaagatgtcaagttttacaccttgaatatatgcagtttttatttgacaattatacttcaacaagctgttcttaaaaagcagattaaaacttctaaaaattatataaagcggggcaggagacatctagaaagggcagactggacctaaggtttgtttacctcaattttccttgttaggactttatttaccttcaactatgtacaggtaaaagtagtttgcagagcaattgctcctttcttgctccatttagtttggggaacctcagttcttgtcctagattctgaggagttctctggccaccacttgtctgaattagccttcattgagtaaggaccatttttagattggggatgtgtaaatgggggcaaaacacttatgaatttatacattctgtaagaaatccatggaaagagctaaagtctgtctattcgagaagatacttaaggtattaacttggggccattctaattagtgttcatgttaattagtggttagatttattataagcctacagaattaagacactaaagtaaatttgggtgttgcaagaaggaacgcagaactgttgtggtttttatatgtctataagtctgcttatacaccaaatccattttagtcctagtgaaggkttgcttgcatccgtcaatatgtagcctaattggtgacaagaattgcttcttctgttcactattccactttgaacacttgaaactgaagaatgactccaactgtgcaattgaagccctccatttttccttcttggaatgaaaaacctctataacttggctccactaccagttattcatgcttgttaacttgtgattttgatattttgtattatagttagtaataaaaatttagttatttggaaattagtgggcaagaagctcttttycagagcactgttgtaaaatttggggcacccaatcatgattatcctgtgtaaacactggtaaatatgttactggaaaaaatattcaggggcaatcaattaatgtcatatattcatttatttttatcaccagcatatgtgattttagcagaaaaattgaaaaataactggtgcattgattgattaaagatgtaatttttaaaaacttttattttgggttcaggggcacatgtgcaggtttgttatataggtaaattgtgtgtcatgggggtttggtagacagattatttcaccactcaggtaataggcatagtacccagtagataggttttaagttctcattttatatgtctattgatacataaaaaattaaaagtcatcagcaaagtcatcagtacactggcaccatacatacacattatcaccataaatgtagaaaataggaaataaataaatcagtagaaaaagtccatgttttcaaggaaggacattttgacttataataacagatgaaacactgaattaatatgagaataggaaactaatagtgaattttaaaatgttttcttttacatttaataaggggctgtatcttgttaaaatgtaatatgcacatcttgactagtcagtcattataaaacatttgataattataaagacatatgattctgtgaaaatagagtgtctgtaaatcacgtgtacatttccaaaatggcttttgaargtgtctcacccagatattatcaaaccaaactccatgagaaaaatgagatgggcaataaaaaggaaaatattagtgaagatagactgttagtgaaggggtaacagaacaacccctaattctcagtggctcgtaagaacagaagttattttttgtttgttttaattcatgcaaagactgcggtgaattaggagaccttccagagccacatccttcatgtgatcaatgggcaatgagaaatgcttccatctggaaggtgaaagcagagagctagagaatcaaacagtggctcttgaatgcctcagcccgtaagtgatagatgccacttctgctcagatgtcactggtgtgacctagctacacaactcccctgtctacatgagacctggggaaggagggcctaatacacactgctatttggtgagtggcaactatctctgtcatggatgttaactttataagaattttttaatgtacagactattttaaaattttactatataatgcatatttctgaagtacacattaagctaaaagattttaaacctttttttgtaaatatgccagatttatgaataaagtaccacaatatctgctaacaacagatttgctaacaacaatgaaacaattgctaacaacaatgaaaaaaaggcttgccagattttcctagccttctagtcctgtgctcatgtcaatatttgataatcccaaactaatcctcataaaatataagtaatttggatcttctgctttcgaaagtttggtttatgaaagaaatactagtctaattagttacagaaacagtctcatgtctgatcaggcttttccagagatacaactcatattcatcttatatttgtgtactctggcatgactgccttctccatcttgtccctctctttgctgtacttttgctttttattttattttattttaatcatgtgagcctcattcccccagatccagatatgctgctgcttgatgacaggagaagatgaaggctagcaatcccagatcatttcctcctgtttcagtgactctagtaggaagataaatactgtctccattcctggaaatcactttggttgatcttgtttgagtctcattccctagcagtgaaccaatcccacttgccataggaatgaggtcctcatgaaaggcttgagactcatgatcattcctgtgctgacatccaggaagagtctttgcttaacagcaccactggaaccagctggaatatggagcacaggactgttcccatagaaacagaaaggtcccttcaacctatgtctgtggatcatgtttaataattatgtctactcttttaactctgagtccatattggacaccccaaattatgtattataaagtacacatccagtcagcagcatttttatgcctctaatttttaaaatgttttaaataaccattaaggtggaattaaaagcattctcaagtcatttaccaagaataaatcataaggaataagaaccagaagctctagtttgtactatataattgttttaaaacaccaggtatctgcagagttttactgaaacaatctcagtacataaaccaatgttttcctcttctgtaaatattttagcaaactttcttttgaagtcaaatgcaaatattcatatttttctctaaaattagtatatttttgtatatagcagacacttttgtggattagagggagaactaagcaatcggatctatctgtaacactttaagcaggtagatttggaaacttctttctcccctcctcctgtaaacagatcttagagggaggcttctaaactacatttgttttgattgtgctgcccttgcatacctctcaaacatgccaccatatatgtgggtacttagcttgtcactgtagagatggtgtaacattaaaggacaggtagctgtttgtcattttcttccattctcaagtgatcactaaattacaagtctttttttcttttttatgtttcattcttagaatgaacatttctagcctttgcatcccaaacatttaaagacaacctcacttagccttataatgacaggttcttctccattaggaccaaaagtttatatctaatcccaacaggtcatatggtaactgtaatcaatccaaccttgctgctggtttttgctctaaaaaagtaaatcatatcaagttatcaagccctgcaaacattctatgagcacctgtatctaccaggcattgatcatttctgtaataggcaccctgccactacacccaggtccttctggctgattaaaatctgtactgctgacagttggcctgcccagacctgccccgactcttcctggaccccattgacactcattctcccttcttgtagcagccttcattgatagttatactgtcagacaccaactgccaccctgcctgaacctgctctctgacttgagatttggatctcttgaagagttagctaagtctctagaacttgtccggcctgattcaaagttttcccaaatccccaatgacaagtatttgctcttatttaatgttgtttactcactgttgtttctaagaaatattatctctgccactgttgctgacctgtcagccttctcccttttcttctattgtcttttcctctttcttcttcactgactgccactttgccagtgcttctaaggcttcacatggttaaccagtctcagtgcaggtatcttttggagtcttggttcttctcagctgggatcatatgagtagtctgatatgtgatgaacacatttgtttccccttccaactattttttgtttgaaaattcagaaaatgtgatggttgaaaaaatcaactgaaaagttgatttttgggtagccaatgttcaatgtgcctccataatgaagccctgctcctttgactatcctttgccttttaaaaaatcattttccacttctgtacttaatttttaaaaatctgtagaatggaagtattagcatttacttttgtaactagttctgctgtaaaacgtaagtaattcatgcagaagttttggaaatacactcataaaatacatgatatgagtatgaagtcttaccataattcaaataagtacatttattattgtatgtaagcagcattttagaaagcactaaaaaattataagaataaaggactgttctaaaatagtttataaagggtcagaaaaaataaacatgtgatttgataaacaaagactaagggagagcataacaaatagcaaatagcttaatggtctacaaaataagcaaacattcatactatgttaatttgacattattcaattaaaaagtcaaacccccttttggttgatacattacctcctaatgtatatcataatgcattaaaagctatgtaaggaaaacctctatagatgactaacagaagctgagcctctgctgtataataattggtcacacttattcacatttattactacatgccaaacaccgtgctgagtattttttacatattaaacttactgaatattttaactgaatatttttcatgcattgttttccttcctactgttcttttccaaacatattgttctgatctctgatctttcctctaagtaccagaggtagagcttagtcctctgaggaagaatgctgccaactgtgccagttcttatggggaggtacatgaaaccctttaggaggatgacaggaattgaagaccagaagcaaaagttgctgttgggttaagggttgttgctgggactctggaagggaaaaatcccttctctcctcctgtcttccatctccctctagcaccttctattcgaagaacaaagcagaaatccaactaacaagaagaaacctgcagatggaacttacaaaagtggaatttatatagagagtagaatggtggttaccagaggttgagggggcaggggagagaggacaggaaaaggggaaatgttgatgaaagggcacaaaatttcagtaagacaggaggactaggttctggtgttctattgtacagcaaggtgactatagttaataagaatgtattgtacatttcaaaatggctgaaagagtggactttaaatgtcttcatcataaagaaatcataagtacttgaggtgataaatatgttaattagcctgatttgatctttctacgtatatatgtatatacgcacatatcaaaacatcacgccccataaatatatacaattgttgtttttagttttatttttaattaacaaagtaattgtatatatagaatacagtgttattaactataattaccttgctgtgcagtaaatcactagaacttatgtctccaatctaattgaccaacatttcctttttccccatccacccacctccccccagcctctggtaaccaccattctactctctacttctatgagttctttagattgtcttctatgacgtttttaaattccacgcataagtgagatcagatgatatttttctctctgtgcctggctcatttaacttaacatatctcccagctcatccatgttgtcacaaataacagacattcccttttttttaaaggccgaatagtatttcactgtgtagaaatactcaaatggaaacaacacttaggttgactattgtgaataatgctttaatgaacacgggagtgcagacatcccttcatcataccgatgtcattttctttgggtctatacctagtagtaagattgttggatcatacgataattctagtttttttttttttggaggaacctctatactattttccaaaatggttttactaatttacaatatcaccaacagtgagtatagaagggtttccttttctacacatccttgccaacatttaagctctttcatcttttgataatagctaatctaacaggtagaaggtgacatctcattgtggtttgttaattaaaaataaaatagaaccttaagaaaataaaaaaaaaaatgtagtttgcagacactcttcccccagcaccacaaacagagtatatagaagagtggatttggagagattcaaatttggagaggtttgttgagagacaacaacttcataaacggaaaagataataaatatgaattctgagtaaawctctcatagattctcccaaatttcacatctgttctcccaggaatttttaaaaaatgttacatatctagtaacaaaataaatatgcatttgtattcttgtcatgatattttattttatgccaacaataaatgtagaagagattcactataggtcaataactttgatttcatctaattaacaagttaccttcatcagttaatgcaagataaatacgtaatttatgacccataatcaaatttcacataatgaaagtcctaatttgacacattagctacattatgtccattagagcttgtcttttacaggtactgccaatgaagcttgaatatattggtaaagcacagggcasaagtaaggtggaaaaagtgaagaagtaaattatgctataaaatatttaccatcaactgccagctcattaatcagacaaaagcaatagagacagccaacagtacatgtcccccmacttttctggagacttactgcctcctgtgtgagtgagtgttttctgtagagccgttttcagttgtctatgatggtatgccagcaaggggcttcccatgctatggtctattaaaatggtaccctggaaaccaggtactcttgcagaaagcagaatcttctgaggcccccactaatggtcakgggtcaaaggctaatacccttgcttttatggtcctgagaaagagcttatgcctctctttggcccttaatactatcttcctttacttgatcccacacagtttatcatgcatgagcagtcaagatgtttcttttttcctttctttataagaaacagttttctaggtacaaatatacatcagaacaattgagtttcttaaagtacttgcagcttcaatatgcaaagctgtccctccgtatacacagctctcctatgtcttttggtaatttccaagaatttttatggcttcagaccccacctctcatcatgaaattatctaacccttggagacttgtgtctgagttccttaagtttccagaatccatccttttcttctctaggagatatttcagggtcaagggatttctttgtcttaggcttgattttctagccctcatctaaaaatgtatttctgttgcactccaattattcccttgcactttatgttccattcaagaagcaagaggtccccacctacactctactgacaaatgccctttaatgcttgtcttycatggctgatctactgatgcccatttctccctccgttttataatagggcactctcagcatcataggttactactgcctatcatttaagactcacatttatacatcagtacatacgggtttaacccaacgttgcaatgcagcccttaagttttacatttaccatttacagaaagattgtaatgtattcataggggataaaaaccattccatctagaataattttaagaggttaaaccaattattgggttgttataatgacagaaatggggcaaggacatcaacaggccaaggagaatgtccaggcagggcagttccaactgggaccatctaatattatttcgaatatatcyacatacacagccagtcatttgacaagaatagccagtgaatccctctttagaaattagtaacttcaggcagttgcagcttaaaatgccaagttagatgtcagagtgctaatgaaaataccctgaattttggagacagacatacccaggtttgaaggatggccctccatccactgttgttgctcccaagtttcctcatatttaaatagtttttaaggcttttaagaaaattaatgaattggcaaatgtaaagttgaaagcatagtacagtacacattactgtaataattagtagtatttctcatgtgtgcccccatcatctttctgtaatctgctgcatcttttattttggagggatgttggctctctggtactctgcattctatccacacgctgaaattggctcataatcactatgcccaacccttgctatttgtgtatggtattaaatattagcctatttcataccttctcaatgataacattattgcccccaaagggattaaaattggttatttgcacagcagcagcaaaaaaaaaaaaaaaatccaaaactcattctcttattatgaataaagcacagatatgcattcagtacataaagaggtatacagtgcatgtatgctgtttaaatttcacctgtgggggggagattargaaaataatgtctaaaaaggcttttttgtgaggaacaatgtgagaaatcaattgagaaacactcaagtgatttaactacatcaccccaatttctcctacaaccatcctactagttctgcaactgattagacagggaagaacttgtccaaagccaccgagttattgagtgataatcatagtttaagtgcaactgacctctggatgattttaccttcaaagggagaggttgacaaattagatattctagtaaaaaacgatggcaaaaaacatggttccagtgaacatttcctcgttcagaaaagtctgttagcatctaagtgcaagtgacagatgtgtcttggtttcacagtagtggaactattgaaacctttggctcaaaaaaatctgagaacttctcttctaaaagcacaaatggagccatcaatacttcttgtcatagaagaataaggaagactgagttttagttctacctgtgtcaggaatgtgtgaaatgtcacttaaggtatgtagacctcatttatctaatctataaaatctgcasattctctttcgtttcttccctttccttctttccttccctcctacctccttcctttcttccgtatatccatccttccttccacactgtctccctttcttccttccttcctccctttctctctgtcctttcctttctgcattccttttgtttttagtagcaaaaattatttccaaaataaaatctctctgaaactctaagtgtaaaatagaagaaacagagctcagagagtcagagtcctatttactacccccaccctaacattcatcaagtagctcaggactctggagccctgtggaatccagttagaagaccactgaattcagtcccttcagttttgaagtatttggctttgagcttctactctgaagtagttgtttgaatctaccaasagttactgtgcaaacaattttatcagcatgcacgtatgcctagtgagattggatattttcgttagccaccttgccaacaartttttctcattacccaaacacacacacatttatgcatatttaaatatgtgcttaagaagcagaaagatatgagttaatggattcattaacaattgtcacatgagtaggctgagctgatctttacacattcgttctcagtataagaatttaaccagatagttgctrtctttacaaacaaaacttttgatacccctaatgatgaggaccagatgaaaaataataatttaaaacttgttactcagcaggcactgtgtattcatatactcccttacccaaactggaaatcccaattagaattctacatttaagttcctgggtagttggtttctactccaagttcagctcaatatcaaaattagaataaaaatgataaaaggccttgagatccttctggatgtgtcacatcttttctgattgctgtactgtcatcattgcagtcttctcagtagcatcccccaattaatggattttagtctacttacctcatttagttctaaaatatttgtgtctttcttattcttgcttgtatttctggtctgactttgccagttaggtaagagcagatttcagcttgctgtgctggctctaacccaactttctcttctaaaattttccattaactgacctctgttttggagcacacacgttttcagatgcctaacttcatgccatgggactgtcatattcttatttttttcctgacctcttagccttggacctggctctgtaccagaactgttgcacagtttgcaaatgcttctattattaataggtcatatccacttgaaagattaaacagttatttaatatgtaagggttgcattttatttgtttaattgatttttaatttaatgtttttggtattataaagtccattaataagagatcttaggaaattattttgctttgaacttaattgaacatattcacgagcagtcatctattttaaccaagtatatagtattttccaatgttcagttttcttcaaagggaatgtattttgtacactcttaggcgttgtattttgtgattttagtaaactaagccagcagagtatcaatgtattttcaagaaaagtgcaatttgaaattctgcatttttaacagtggcagtggctatggcattcaaatgtacaattctatttttgaagacttgaagtgttttgttactttctgtctttgtgtgtgtgtgtaatgtatgcagaaatgtactaggagctctttgaaataaaaagaaaataagtagagtgtcaaagatttacctgtcttcctcaagcattttctaagtgcttgcaatcagttactatgcttcttctctgggctcatattttactgtttttgtttatttaaagagataaaaatataaatgattaacatcaagacttgaatttttggatgtctttatcatgtcatagatgatagggctcctaaagctacctgaaaatcattagaattaagtgtatgactgacaacctgcgtgtggtttgcagacattctctaagattgtttgaaatgatgttttgttacataatagtaagtagtgtgtgcatctatttgagctaatggtgatattgcaactttaaaaaatggtgacaatttacactacttgcatcagaagagttgttagtgtgtgagaattacagtcatgctgctgtctccctacagactctaaaccaattgcacaattaatatggaggtataaatgaatgagaaaatggtcatcttcattactggtaaatatgtgatggaaagtagagcttggattagagagctgaactctggcttcctaataccccatgcttccccagtggccatgagtgtgattcttragactcattatcagagagaggaagcagctccgcagagctgtgacttcccctgccagtcatgccagggaagctgctcctcatgacagccttctacagccagctgatcccaaaaacataaacttggcagggctgagttacgcattcctagtgcctttgtctaatcttactgatcagataaattactcccccttccagagggaaccatatagatgtctgggtaaaagacagattagggagaactgcatatagagttggtagttgaaaactctagggtagccattattattccaacttagaaaatgaaaaagcaccctgatagargtcagggactctgtcaaggtcacagagctagtcactgatggagcaaagcttcacatgttctacttagggaggctgcgttagtcaaaggtagcgcagctgtagacctgtgctattgcatacagctactcattttcttctcacatagtggttgccatagaattttcaacagctcagtcccatcttgtgttaaaatctgttcttccgggaaagatgatcattgctccattagcacatccctattaatcttttggtacatgctactctcttctctgtctgagagaaacttcactcaatttcttcgagccagaaccrcctaagcctcatggtcactgtcctctgctctgcttcttcgctctaactctgccctctctcaccacatgtgagatactctgtgctctgtatctggacagtgaccccagtctctcctgctgttagtcctgctgttgcattttgtaacatagccctgctttcttaaagctggatgctttctaccctctattttccactttgaatagattaagatcaattaagattattaaccataaaaagggaaaggggattccatagtggagcagttttactagatgaaaatgttttatccactctgttctctaataaaaacaaacaaagctcaacaaaacaaagctcaacaaacaaaaattctcaactttatccaacaaaatcaatacacaaacaaactttcccaatgctttcttcccttcgcacatgtgctggtgcccatactgatatgttttacattcaccctaggaaaaataatttaatggacttggagaggctttccaggcaatattcaaatgcatatatcatgtgtcgacttgtgatttctgcttatgttaccattttgattgtctatcacctctgccaaggaaaagaggtccatctgacagaattacttaattttgaaatctatatataaggaatacytatctataaagctatttacatctttatctgttaactcagtgattccaaaataataaaaatacctaagttcaaaatatgggttgaatcttaattcttatgaaaacaattctatttagttaaatgttaccagatagttactgtgacccaactatattaataaagaactggcttgaggtgaattagtaggaacaaagtttcagagacagaaaacctgagatggaggccagctttaacaatcaccctgtgaccatgcccttgtgtaagtcagtaatttcctttctatcttaaagttcttcatgtatatagtgtgaataataacactgtactcattgattgtgttgggattaaattaagataatgtaaaaatcttagtacagttcctagcacataaacagttccttataggccaggtgcagtggctcacacctgtaatcccagcaatttgtgaggctgaggcaggtgaatcacttgagtccaggagtttgagaccagcctgggcaacgtggcgaaaccccgtctctaaaaaagatacaaaaattatccagscatggtggtgcatgcctatagtcccagctacttgggaggctaaagcaggaggatcatttgagcccaggaggttgcagtaagctgagatcgcaccaccgtactccagcctaggtgacagactgagaccctgcctcaaagaaaaataaaagttattcagaaatgttaattatgtaatcattgaatttttaaggcttgtgggaattgagcataattgatactatgcaatgaaagaagggatggcttttttattattcttctctgaagtccactttcctatttagatactgattcaaacaaataaatgaggaaacaggtcttgtggaaatatatatgatctgtatgaatgattaaaatattctgaaatttattgaaggctagacaggaaacagtgagaycctttccacatccacagattcattattttcttatattgctaaagttatttccaaatattatctcatttattctttcaacagcctttcctattgttaacatggttttacaaacatgacacctgtggctaagaaagataaaataaattggctaaaggttcacagaagctataagaaaagaatcaggagaattcacatggtctttgtttcccattcattgttgtttgtatgaggccccattacttctaacggtatgaaaatttgtaaaatttgttaagttctgtacatttacatttgcatacttataaaatgcaagcactgtaaatttgtgaataatctttttcttaaactgaagttctttgaaaaagcacataaagtttttatgaaaatgtaaatgacaaaaacaatatccatttcattgtagttccctgtaaaatgaagataatagacacactattttaaaacgcttttgtttttgaacatttgtaatagtcctggattaagtttcattaaaataaaagaagatgggctacattgagaaaattgtctagggtctatggagaggaaaatcatgtttctgtgaaatagtatataacttcatgaaagccataagatgctagtaacggttgtagaacagtgcttatttttgaaatttcaagataagccagtttggttggaaacattcaacctcagacatcatggtggatagggtaattatagattcaacaaacttcactgatcacttgaaacattctttccaatggtacatcatatagaaggttttcaattcattttggctattattgacaaaattaccataaaaggagaaagagtataagtttggagttgaatggttcgaaaataatactcacattcaggattctgtaaagaatttactatgccttggacatattacttaacctctttaaattaccttttccaatttttaaaatgggaggctactaggattattctagaattagagatcacctatatgaaaagtctacaatgtagtgtaagctgcataaaagacggtgattgtctgagttttcctgaaagcagaagtctgagacatagacatgcatgcaggcagtttatttgggaggaagaatctgtgaggaaacattgtgactgaaacaggggaggcagcagaggtgtgtaagggtgtgtctagagtccatggggcctccactctcctaagacctctgaaacatggagaccacctcctctatatatccatctgaataataggaggctagaacgtttgtccattggcatagttcttgttctctaaggatctatttcttctaacctaattttaaaagaaatgacacatgcttattaatacscttttttgtcaagatgctgtgattattgattgccaaagctctctaaggctagtctttccactgttaaggcttcaagattttataaacaagatggaaggctttattcagcagaatatgctaccatttttaagagaacagcagttgtcagcatgcagggaatgtgcccttaccaagggcttgtctgaaatgaagaggtggtcatattagagaacttggataagaggagaaagatgaaataaacaagacccaaatgttggtaagggtaatgtattagccagaattctccacagaaacagaaccagtaggcygcagatatagatatgtaagaggagatttagtatgggaatttgcatatgcagttatggaaactgagaagtctcaccatctgctctctgcaagcttgagaaccaggaaagccagtgggcaatggtgtcactcccagttggaggctgaaggcctgaaaactacaggggggttgggagtaactggtctcagagttcaaaggcccaagaaccagaaactctgatgtcttggctctggtgggggasggggaggaatttgttcttcctttgcstcttggttctatttgggccctcactggattggatgctgtccacctaagttggtgaagacagatcttctttattctgtctactgctttgcatgctcatctcttcaggaaacacactcactcacacaccaagaaataatgttttaccagctatctgggcatcccttaagtctagttaagttaacacataaaagtaattatgacacataactttcagagaaattaaggttgctgtggatgagggtaaaaccttaaagggaaaaagaaaagtctaaagattttttacaagatctttctttgtggtatcctgtataaatctgtaatacgtcttcaaagtcttgtttttctttacacctttcagatttagactactaataccgggtaataaggcgtctttgctttatgtggattatatatgaaatctgtgcacacatagtactttgccaatattcaaatcatcctctatgacaagtactgcatacctcaaggtacttggatttaattctcaaagatgtctccattgtgtgtctttagttcttttaattgtcatgctgtgcatgtagttatgttaatagctgatattgatttgcagttaatgtgcaggactcagggtaatagctatgccaaaagattgcatttgattactacattgtttcaaaaaaaaactttctcataaaatacrtcatttaaatatcagaacrgggataagcatttcactgttgcagacattgggactcaaatatgttttgtggcttctctaaatccatgtgcttctttaagtctatactatgtggacagttaaatttagatcttctatttcctagcctaggttttttccactatatayggctgcattgtcatatttgtatgcttgaaattatacactgctttataaattgatattctataatatattaagtatatatttgatatatattagttacccaaagtagaagacatgataacataatttataatattaaatgttttccctacaaatacaataggggcacatgtgtatttgtgacctacactaaaaaattaagatttataaaattcaagatattatcatcattatcatatgcataactgtgcagaatactatagcaaagtcagaagaactaaaaatcttcacctctggaagtctgacaatctagtttggaagataattctaattcccaaagaaaaatcataaatagtatataagtgagtacatatccaatagtatagaaaatagttcagagatctggaatggcgatgaattggactggctcctggaagattgaatgatttatatattgtaaatattgggaagaatgtgaaattagaagatgagaggggaaaaaggtgtgttttacaaaagtgaaaaaatctgttttactcaaggttatcaatagagtggaacaagattgtggatggatgttaggtataagaatttagacttgaggcttttagcataacattttcctgagtgtgacctgaacacatccaggatacccaaagacattttcagggactgtgaagaacgatgaaccctattttcatcataatwctaaaccatcatttgtctttttcactgagttgacatctacactgctggcacaaaagtactggtgggcagaattgctagtgtgttaatatgaatgttggcactaccaccaaaacagttattagtcattctgttcttcgctaccatgaacttcytgttttttgtttttttttctgtccagttacagctgaatgctattgataaagcaaggaaaattatgaagtttattaaatctcagtttaccaggtttctacatgatgagaaagaagaacttctaatccttaaagtatgatggttgcttcaaggaaaagctcttatgaggttaggttgaaagctgatctagttgcttttttcatggaatgccatttttagttgaaggaatgactgacagataattatgtttattcaaacttggacatatggtggatatttccttgaaaatgagtggagtaagcttgtcacttcaaagaaacaaactgacagtatttgttgccaatgataaaatgtgagctttcaagcaaaaagtagaattttggaaaatgtattccatcaccatgagcttgatagcatttccgttcttaaatactttttttggtgagattggtgacgatattaacaagtgtattttttatattctatagtaaaatctgtcagctcagtgtacgaatgtttaccaratgagaaatgtatgatattaggaaatcatcatgaaaaaagtagatgcatagatgaaagatccatttaaagtgcaaaattgaccaatggattttaatataatagtatagggaaaggtcattgacattgttttggcttctacactgccattaaccttccagaaactaccccagtcaagtaatagggtagtatcaaaataaataaatctataattatcagaaaaagttattaaaatattacttccrtctcgtgtggtggcacatgcctgtagtccctgctacttgggaggttgagaacagggaccgcttgagcccaggagtttgaatctagcctagacaacattgcagaccccatctcttagaaaaattaaaatacgtctcaatttttcmaccatattgcgtgtctgaagcggggttttcattatawacctttaccaaaacaacttatagattaaatctagaagaaaatatgagaatttagttgtcttctattaagccactaactaaagatatttgcaaaaatgtaaaaaaagaagccactcctcaataacactttgctttgaaaagaacactaagtatgcacactaagtaacttaaaatgctttataatttgaggttgataaattgatatggtaattactgttgaaacagagcactagtctgtagtacctctgataaaatttgtggtgactgatgctcaagtctggttataagtgttttggaaatatgaacatttgattaacagctaacacattgtggttatctgtactctggactagtcaaattttgtttttccagttttgcatagggacacattagtaatctttgtaagcccttcagtaaatcacaagatctctttattgagtcataaccagcattgagttktaattttcataaaatgtattccttgttaaacatataatgggcttacctttgttattataaataaatacataattgtttaaatatttctcagttttaatttcaaatatggtaaatatcaacagacgtaatccacaaaaaacaaagcactgaggtatcctcgatattttgtaagattttaaaggggtcatgagccctatcaagatttttaaaaattgtgagatctatatatgtagcttacgaatggttccagccttcaagatggtgattctgacaggctgggaagtgtaaccttcaggcgaaaccagaaggcactttgagggaggggagagtggaacagggatatatgctgacaaggttggccaagtaaacatattcaacaggtttgaggaggtcttatggatattcacaaagggagtcctgacacatgcatactgaacaaacatgtatgttacatgtgtcccatgttcattttggagtggaaacgacatttaaatgcattacaattaggtcttatatgtcaaaaggtgaggcaggagcatgaaggcattcaaatgtgcagcctctgagagcaggccagactgagcccagtggttggtggtctcttaccacgagaaagttactgaaattagtctcttagtcaatcagagctatgtagctatggtttgttggacggggggttcaactggtcagtgtctgatgaatgagctgcaattatattgcttatctagaggccagggcttgtttacctactagaaaaaggaaaaccttgtggcagttataatagagtttattcttcaagtgtagaggtacgtgacttaatgcttgccttgcatggccttaggtcatgtttataatttgttatcttattgccatgaaaagagttcgctctgttggttatcatctctagtttatcattaatgctggtcaattgtgtttaaactgcaaaaaggagggagtataatgaggcatgtccccattctgtcttggccaggaactcagttctttaaggtttctctggggtccctttggccaagggagggtccaggagcttaggactgtagttttagttctcaggccgaaaaggttaacaactgctaatttggcagaggggcaaccactgaagattttttagtcttcagttttgtctcccttgtacccagtgtctatactataatagagaggtctgattttaattcttctttaaatcccttcaaaggccaagctctttagcattccttaacacttccataaaggcccctatgaagatcctctagctttcatccccagacaccactcatcatttcacatattgcaattacttatggggatcgaggacacaccccactgtgctatttagtgccctcatgccttagcttgtgctattttcctcycctggaaagcctttcatgccccccaccccctttttttttgttgttgttgttgctgcctatgtatgatttgtctattaagaccttgattgcactcatttcccttgggaaactgtagctgaactccaaatctgggtcatgtgttaccccatattattatgacatttcttgattctgtgtccattttgtctagtggctagtaagcttcttcaggacagagaccttgtgcttaacacatagttaatgcttaaaaatgcttattgcatttgcatttgcttgctcaataatgcttgcataatcaatgataataaatgcttgcttaaaaataattaatacaaatactagttaggagagttagtctgataaccaactcgaaaatgatttcaagtcagaaaggtccrtagtatgacttaagcaaaattctggtaaacaaaatcaagtacataagtcagactcactttttcctccttgtttacatgcagatcgagtgacaataaaaagttttcaaaaaaaaaaacaaaaaacgtttaacgatagatccatgctagcacagccttacccagctttccaaaaatggggtcagttatttaatatttttaatagcacgtttgttttacgaaggccagctctcacattttaaggtcactgttacaaatttgwtttccgtggaagaggttttaaagaaacaaaaacttttggaataaagatttagcataactttaaaaaaaatcactgtactaatgttaaaatatgaataaattgaatttaatttcttgcttggagtaaagtagtagtaagtaaaagtagtagtaagtaaagtaatttaagtagtagttacatttaaaaatgagggtactttcttatgaatgtgctcattgccctgcaatgactaactttaaattcgtctagacgtgagaaacacatttgactacagaaatgatagatgagcacttcttattartatttctatatcttaatgctattgaaatgcatgctaagggatcccagtcttgttgtttttttgcttttctagatgtcattccatttcagctatttccttagtcataatgtaggtctatttgcgtaccacgtgggctgagtttgcacagctgtccttgccaaaggctgccctgcagttgctccatcattggggtaaccagctgttacttatttaaagcctccatcattttgtatgacagagtaacttaattatcccctgctttggagatgctaaatraaattatcttcaaaacaagtgcacttcatttaatatttttctccatcaagtacttgaactgtgacatttacgtcataagcactaagtaactaaatgctttataaattgaggccttctgatagggtaattattatgaagcaaagcacttttccaaaagtacctgtgataaacattgtagtgactgatgctcaagtctggttataagggttttggaaatacagaaatttgattaacagataacatgtttatttacactctagaccagataaattttgtttttcaaattttggatagggatgcattagtggtttttgtcagcccttcagtagatcataaaatctctttaatgtatcatgaccagcaaaggaaggaagggaggaggggaggaagggagggagggagggagggagggagggagggaaatactaagggtaagttttatgaaatttaattttagttatatataaaatacctgtgataaacattgtagtgactgctgctcaagtctagttataagtgttttggaaatatgaaaatttgagtaacagataacaagtttatatatactctagaccagataaatgttgtttttcaaattttggttagggacgcattagtggtttttgtcagcccttcaatagatcataaaatctcttcaatgcatcatgatgaaggaaggaaggaaggaagggagggagggagggagggagggagagaatagtgaatactaagggtatgttttattaaattttattttagttatacataaagtacctgtgataaacattgtagtgactgatgctcaagtctagttataagtgttgaggaaatatgaaaacttgagtaacagataacacgtttatatatactctagaccagataaatgttgtttttcaattttggttagggaygcataagtggtttttgtcagcccttcaatagaccataaaatctctttaatgcatcatgatgaaggaaggaaggaaggaagttgaaggaaaggaaggaaggattttattttataattatatatattatatatatttagttatatatttatataacaaataaatatagttatatatgtaactaaaataaattatacatatacatatatatatgtaactaaaataagtatacacataaacatcttggataagatataaatgtttttcttagtgtgggtaccctgtcaaraaagtttaaaaaccaaaatcatgagactgtcacataaacctttatagaatttaccagattaaactcctgaacacacttgtaatctcacagatatttgcccatggtcatgtttttcccctttaaaatttttttctattttttaaactgtagtaaagttacacagaagataaaatttactctcaaccatttttaagtatacagtgcagtgatrctaagtatattcatattgttgtgcaatcagcaccaccatttgtctctataactctttgcatcttacaaaactgaaattctatacccattaaacaatatcttctcaattcctcytccccccagaccctggatctaccattctgctttgtgtctgtgattttgagtactctaggtaccttatataagcagaatcatgtttgtcttttttgtgacttgcttgtttcacttagcataatgtcttccagattcattcatgttgaagtgtatgtcagagtttcctttttgaggctgaataatattccatagtatgtttataccacattttgtttttccattcatctgtcagtggacacttaagttgtttccaggttttatctcttatgaataatgctactgtcaacatgggcatacaaatatatcctcaagaccctgctttcaatactttgtggcatatayccagaagtggaattgctgggttatatagtaattctatttttaattttatgaggaactgccatattgttttccaaagcaacrttaccattttacattactacaaacagggcacagagattccaatatctccatattctcaccaacatgtgctttccgtttttatagtagtagccatcctaatgggtatcaggtggtgtctcatacttatgatttgcattttcctacttatcagtgatgctgtgcatcattttatatgcttattagccattcataatcttctttgaagaattgtctattcaagtcctttgcccatttcttaatatagttgtttgattatttgtttttcccctaatttttaaatttgagatacttttagacttacaaaagcrttataaaagtgacacagaaagctctccttcgtycttctcccagctttccctaatatgaacattgcatataactatggtaagtaaaatgatcaaaacaaataaactaacatactaagaaaactrccaactttattcagatttcaacaatttttccattaatatcctctttgagtcgtaagatctaaccctggatcccacgttatcttaagttgtcatgcttccttggtttttttcaatctgtgacagttcctcaggctttcttcaaatttaataaacttgagaatttgaatagtactgstcagttaacttcatgaagtacccctcacttttctcttgattagattgaatgtatatactgttgggaagattgtcacacaaataatacactcttatctttgtatcatatcaaggatatgatgtcttatgtcttatgtactaatatgcagtaatatgttttattacwtgtraatgaaccttgcttatttgcttaaggtagctttttccagatttctccattatgaagttatgattttttcattgrtaattgataaatatttatttggaggagatttttgtaactgtacaaataggtgtttcttcttaaaacatatccactaaatttgtcatccataactggatcttgtctatagcaattattactgtgatgttctagtgatgattttctacttcccttattcctttttcgttcactaattggaattatcctttaagggaaaagctttcctttctcttcaatttatttattcaaatatttatgtcagtttggacacataagtatttattttatttattggtttataatccaatctaatcatcatatattttgcactcaaattttttagctttgacctttgagagctctttgagatggctcctgtttacctttggcatgccccatcattttcgtaaaaattatttcctttaattttgtaccccaagatgttccaggttcatcttgtattttcccggctacaaccctgggatcratgtcttctacaaggatgctggagaatggtatttagaaatcaaaatctggatgctaagtgtgcccattactactggggtgtcactgtctctaggctctctcaaagctagaaaacatgtatatgcactaaaccatgggcacagtcacctatttatttatttttgcatctatttttatatatatacacacgtacacataaatatatgttgaaagcccttgcrttttactgatacctctgactttgaaccaacattacaagggtcattctaacttttcctgttttcttgattgtaccttctttctcacacagtgagaaatttggctccctttatatacaatatatatctttatttgttaagccctggtatatgtatacagtagcttacaaatctaacccatagctctgtgagaaacaaatttaccaattatagtttttgtgtacaactgattttgtctttaaccttacagtagctagtcaaaacaccattttatttacttayttatttdtktatttatttattgagacagaatctcactctgtcaaccagactggagtgcagtggcacaatttcagytcacctcaacctctgcctctcaggttagcacaattcttgtgcttcacctcccaggtagctgggactacaggcgtgcgcccccacacccggctaatttctgtatttttagtagagagagagtttcaccatgttggccaggcaggtctcaaactcatggcctcatgtgatctgtctgcctctgcctcccaaagtgctggrattacaggygtgcaccactgagcctggcccaaaacaccattgttcagttactcaggtcatttcctttcttcttcacccacttcagtctagttatatratttatttgtaatacrgttagattgattcgtcacagtctgcattccaccttgggttgccatcacattctggttgatttttttccctctgggtcatgtcataaatgaaaatagatagacaacaagtgtttaaaagtgtggagaaattggaaccttgtatattgctgagattataatatgatagagctactttggaagacaatttggcagttcctcaaaatgttaagtatagtttctatataacacagtggttctatctatctatctgtctgtctgtctgtctgtctgtctatctctctgtcatctccacgataaagtttgaaagtccacataaaaatccgtacattaatgttcatagtaccattatttaaaatagtcaaaaactggaaacaacccaaataaacatcagctgaytggtggataaacacaaggtggtttatctatatgatgaaatattatttggcaaccaaaagaaattaagtactgatacatgctatgaaatggataaaccttgaaaacattatgctacatgaaagaaggcaatcacaagattgcatatagtatgaggctatttttataaaatgtccagatttaggcagatacacagagacatatagtaggttagtgattacctagggctaggggaaggctcatggagagtattgctaatgggtacagggagaataaaatattctaaaattagattacatttatggttgcaaagctctgtgaatatactaaaaacttctgaattgtgtactttaagtggatayatgaattctgtatcaataaytttatttaaaaatgtcttaatgcacaactctcttccattacattaaaagtaattcagtttaccaacacaagattaggatcatttcatttgcttgtgaagaacagaatattatcatatatttactagtgtagatttttagcataaaaggctaaggtagttgaggcttgtcaaaatttcaagcaaaagaaagttaatatcatgattgatgtagagactaaagatcatcttctgagaaatatgtgaaaatatctagcccattaccacctacccctcttttgaaaacagatttacccatatttaattataaaaatggctattatatcatacatttctgctttgatctagggcagtattgattcttcatattctttatcataaatatattttggtgttagttcataaggtgaaaactaggaaccccaatagtagagagggcaagaagcttactaaaaattagcacagccatttagtgttcgacctagttttcaaatctaggtctaacttatcccaaagccctgatactttctagtgattaccagcatgaattttgagaatgataactagatttctcaattagcatgctcrtatcatttggctactttgaagacaattttatagcttctaagagaaatcattttttaatgtaataaacagtatgcaaaatattgcttttattctgaattttgagtctaagtaatatacaaaaaccatgaaaattaaatagattatttactsttaggtattaattattctaattatgagaaaaataatcatagataaacaggaaaaaaatggaaactgaccagagaagtgatcgttgatttccttatctcacgccagtaatgtctctgatccagctttggatatttaaagaataatctcatatttatgttttaccttkctcaagatggatttaagacaatatgcatacatacttaaaatcagaatattaaagtaaaaagtaaatgtggcattcagaacaaagaaaagaaaattaatttaggcaagaaaggataaagcaagggatgagattaataattgttgtgtgttaaatggtgtctcctaaaaagatagtcctacttcctaacctctggaacttgtaaatgtgatcttatatggaaaaggggccttagcagatctaaagttaatgattttgctctgtgatcatcctgaattagccaaatgggacttgaatccaatgacaggtgtccttagagtagaagagaaggccatgtggacatggaagcagagattgaagttatgcagccaccaaccaaggaatgcttggagccatcagaagctagaagagggaaagagaactgcatggccaacaccttgattttgaacttttggtctccagacttgaaaacaaacaaaagaagcttctgttgtttcttctatccacccagtttgtgtgaatttgttagaacagccacaggaaagtaacacaatactctaaataaattgtcttggtagaaaagtttttaaaatttctttccttttttccctcctttccttctttccttcctttctccctcccttcatcactccctcccttcctcccttctttccttcctcttttctttctttctctttcgttttttctttctttckttctttctttctttctttctttctttctttctttctttctctctttctttctttctttctcttacttctccttttctcagtctctttattgagacataattgacaaataaaaagtatatatattgaagatatctgacatgatgatttcatacatgtatacactgtggaaataattaccacaataaagataattaacatattcatcacctcacatagttatctttgtgtctgtgtgtcaggtgagaacacttaagatctactctcttaacaaatttttagtatacaaaacagtcaccatgctgccacattaaatctccagaacttatttattatataactgaaactttgtatgctttgaccaacattaccccatttcccccacccaccagctcctggcaagcaagatttcagtctctgcttctataagttcaacttttttagattccacatataagtgggataatgcaatatttgtttttctatgtctgccttacttcacttagcrtaatgttctccaagttcatccatgttgtaccatatgttagaatttcttttctttttaaggctgaataataatctattaaagaattgaatatatctcacttttaaaattcatttcctgctgacagatacttaggttatttccatatctctgctattgtgaataatgctgcaatgaatatggaagtgcagatatctccttgagatactgatttcattcattttagatatatacccaaagtgctagattgtatggcagtttttttttatttttttgaggaatcttcataatgtttttcataatggctataacaatttacatccctatgaacagtgtgcaatgttttccttttctccccatccttgtcaacatttsttatttttttcttttggataatagccaatctaacagttgtgaggtaatgtgtcattgttgttttgatttgcatttccttggtgattattattgttgagtgtcttttcatacacctattggtcatttgtatatcctctttgaaaaaatgtctattcaggtcctttgcccattttaaaatcaggggtttcttttgctattgagttatatgactttcttacatattttggacataatccattattagatgtatggtttgcaaatactttctctattttcacaacttgtatttttatttgctgtttcctttcctgcacagaagcactttttagagatggctctttctgttacccaggctagagtgcagtggcacaatcatagctcactgcatagcctcgaacccctgggctcaagtaacccgcctacctcagcctcttagctggaactacaggcatatgccactatgcctggctaatctttttattttcatatttttagagatgagtattgctatgttgcccagcctcaaaacaacataacttggtttgtctcaractcctgtccttaagctgtcctcccacctcagcctcctgagttgctgggattacaggatgcagaagctttttaatttgatgtagtcccgtttgtttatttttatttttgttgctggtgtttttggtgttgtataaaaaaactttgccaagaccaacataaaggagcttttccctgtgttttatgcaaagagttttaaggtttcaggtcatacatttaatgcattcactttgagttattttttatgtatgatataagataaaacttcaatttcattatttttcatgtgaatatccagttttcccaccaccatttgttggatgatgttttccccattgcatatttttggaacccttgtaaaagattaggtgactgcatatgtgtagctttatttctragctctttattgtgttccattggtctataagtctgtttttatttgcaccatgctgttttgattactatagctttgtaatgtagtttctaatcaggcagtctgatgtcttcaactttgttcttctttctcaagattactttgtctatttggagttaactgtggttccgtacaattttaggattattttttcctatttctattttttaaaagtcattttaattttcataggcattacattgaatttgtagatcatgttggatagtatgagaattttaacaatattaattattccaattcatgaacatggactctctttcracttttttgtgtctttcttcaattttttcatcaatgtcttatggttgtcagtacacagatcttccacctccttaaacttttgtctatgtattttatttttttaatgtgatggcacatagaatttttttyttaattggatagtttgttatttagtgtatagaaattcaaccgatttttatatattgattttgtatcctacaactatactgaatttgtttatgctaacagtttttttcatagtttttagattttcctgtatgtaaaatcatgtcatttgtaaacattagtcatttcacttctttcattctgattaggatgacgtttatctttttattcttgcataattgctttggttacaactcccaatactatgttgaatagaaatggcaaaagtaggcacccttgtcttgttcctcatcttagaggaaaagctatcagcttttcacygtgaagtatgacattagctgtgattttgttatatatggcatttgttatgttgaggatctttccacctaatttgttgagaattatttttatcatgaaaggatgttgaattttgtcaaatgtcttttctgcatctattgaggtgatcatataatttttatcctttgttctataagtgtggtgtatcacattaattgatttgtgtacatgaaaccatctttacatcccagggataaaacccacttgattttgctgaatgaatgatacatttcatgtgctgttatttcttacataccagtcttatatgaggcaggaaaaccctcccctgcaagcctaggaaggaaaaagctatagcagcacagtagcttccttcaagaaaattccctattcaactcacggcctatctctaggactctttaaagtcttttcaggatgaacataggttttcagctaaggattaaaaatgcatgtaggttgggcatggtggctcttgcccataatcccagctctttgggatcccaggcagattatttgagcccaagaattcaagaccagcctgggcaacatggtgaaacctcatctctacaaaaaattaaacaattaggcaggcatggtggcctatgcttgtagtcccagctactcaggaggctgaggtgagaggattgcttaagcgtgggaggtagaggttgcagtgagccaagatcctgccactgcactctaggctgggtgacagagtgagaccctgtctccaaatatatatatatatwcacacacacacacacacatgcacaaacatatatgaatgtgtgtacgtgtgtgtgtatttcaaatacctcctttgcaaatactttttagttggaaatctagcacttcattttggaatgtggaaaataaatcattccaaattgttttaggacatcaactgaaactgagataattaaatgtatgagatattgctgagagaacaatgaatataaaacgaatataaaaatgatacattagtccattttcatagtgctatgaagaaatatctgagactgggtaatttataaagaaaaacaggtttaatggattcatagttccacatggcttgggaggcatcacaatcatggtggaaggtgaaggaggagcaaaggcacatcttaccttgtgacaggcaagagagtgtgttcagggtaactgtcctttataaaaccatcagatctcatgagacatattcactaccatgagaacagatgggaaaaacctgcccccatgattaaattacctccaaatgggtccctcccaagacacatggggactgtgggagctataattcaagataagatttgggtggggacacaaagcctaagcatattattccaagctggcccctcacaaatctcatatcctcatatttcaaaactaactatgccttcccaacagtccactaatgtcttaactcatttcagcattaattcaaaagtccacggtccaaagtctcatgtgagacaaggcaaatcccttgtgcctataagcctacataatcaaaagyaagttagttacttcctagatacattgggtaccggcattgggtaaatacacctgttccaaatgggagaaattcgccaaaatgaaggggctagaggcccyatgcaagtttgaaatccagtaggactgtcaaatcttaaagctccaaaatgatctcctttgactacatgtttcacatccaggtcatgctgatgcaagaggtgggttcccatggtcttgggtagytttgtccctatggctttgcagaataccaccccagttccggctgctttcaygggctggcattgagtgtctgcagcttttccaaatacaaggtgcaagctctaggtggatctaccattctggggtctggaggacagtggccctcttctcacagctccactaggcagtgccccagtggggactctgtgtggaggctctcatcccacattttccttccatactgccttagcagaggttctctaggaggrctccatccctgcagcacacctctgcctggacatcagacatttccaaacatcctctgaaatctaggcagaggttaccaaatcacaattcttgacttttatgcacccacaggctgaacaccatttataaactgccaaagcttgtggcttgtaccctctgaagcaatggcctgagctgtacattggaccctattagccatggctgggactcagggcaccaagtcccgagactgcacgaagcagtagggccctgggctctgcccaggaaaccatttttccacccaggcctccaggcctgtgatgggaggaggtgccataaagacctctgacatgctcgggagacattttccccattgtcgtggcagtgaacatttggcttctcattactcayrcaaacttctgcagctggcttgaatttctcctcagaaaatgggttttcactttctattgcattgtcagctgcaaatttttcaaacttttatgctctgcttccattttaagtataagtttcaattccaaaccatatctttgtgaatgaatgaaactgaatgcttttaagggcacccaagtcacatcttgaatgccttgctgcttagaaatttcttagatgcagaaaaggcctttgacaaaattcaacaacccttcatgctaataactctcaataaattaggtattgatgggaggtatttcaaaataataagagctatctatgacaaacccacagccaatatcatactgaatgggcraaaactggaagcattccctttgaaaactggacaagacagggatgccctctctcaccactcctattcaacatagtgttggaagttytggccagagcaattaggcaggagaaggaaatacagtgtattcaattaggaaaagaggaagtcaaattgtcsctgcttgcagatgacatgattgtatatctagaaaaccccattgtctcagcccaaaatctccttaagctgataagcaacttcagcaaagtctcaggatacaaaatcaatgtgcaaaaatcacaagcattcttatacaccaataacagacagagagccaaatcatgagtgaactcccattcacaattgcttcaaagagaataaaatacctaggaatccaactcacaagggacgtgaaggacctcttcaaggagaactacaaaccactgttcaatgaaataaaagaggatacaaacaaatggaagaacattccatgctcatgggtaggaagaatcaatatcatgaaaatggccatactgcccaaggtaatttatagattcaatgccatccccatcaagctaccaatgactttcttcacagaattggaagaaactactttaaagttcatatggaaccaaaaaagagcccgcatcgccaagtcaatcctaagccaaaagaacaaagctggaggcatcacactacctgacttcaaactatactacaaggctacagtaaccaaagmagcatggtactggtaccaaaacagagatatagatcaatggaagagaacagagccctcagaaataacgccgcatatctacaactatctgatctttgacaaacctgagaaaaacaagcaatggggaaaggattccctatttaataaatggtgctgggaaaactggctagccatacrtagaaagctgaaactggatcccttccttacaccttatacacaaattaattcaagatgkattaaagacttaaacgttagacctaaaaccataaaaaccctagaagaaaacctaggcattaccattcaggacataggcatgggcaaggacttcatgtctaaaacactaaaagcaatggcaaccaaagccaaaattgacaaatgggatctaattaaactaaagagcttctgcacagcaaaagaaactaccatcagagtgaacaggcaacccacaaaatgggagaaaattttcgcaacctactcatctgacaaagggctaatacccagaatctacaatgaactcaaacaaatttacaagaaaaaacaaacaaccccatcaaaaagtgggcgaaggacatgagcagacacttctcaaaagaagacatttatgcagccaaaaaacacatgaaaaaatgctcatcatcactggccatcagagaaatgcaaatcaaaaccacaatgagataccatctcacaccagttagaatggcaatcattaaaaagtcaggaaacagcaggtgctggagaggatgtggagaaataggaacacttttacactgttggtgggactgtaaactagttcaaccattrtggaaatcagtgtggccattcctcagggatctagaactagaaatgccatttgacctagtaatccyattactgggtatatacccaaaggactataaatcatgttgctataaagacacatgcacacgtgtgtttattgcagcactrttcacaatagcaaagacttggaagcaactcagatgtccaacaatgatagactggattaagaaaatgtggcatatatacaccatggaataccatgcagccataaaaaatgatgagttcatgtcctttgtagggaaatggatgaaattggaaatcatcattctcagtaaactgtcgcaaggacaaaaaaccaaacactgcatgttttcactcataggtaggaattgaacaatgagaacacatggacacaggaaggggaacctcacactctggggactgttgtggggtggggggaggggggagggatagcattrggagatatacctaatgctaaatgatgagttaatgggtgcagcacmccagcatggcacatgtatacgtatgtaactaacctgcacattgtgcacatgtaccctaaaacttaaagtataataataataaaataaaataaaaaaaagaaattcttctgccagataaatcatctctctcaaggtcaaaagttccacagatctctaaggcaggggcaaaatgccaccagtctatttactagagtgtggcaagaatcacctttgctccagttcataataagtttcttatttccatctgagactacctcagcctggattcattgttgatattactgtcagcattttggtcaaaaccattcaaaaagtctctaggaagctccaaagtttcccacatcgtcctgtcttcttccgakacttccaaactcttccaacctctgcctgttcccagttccacagttccacagttgtttccacattttctggtatcttattagcagtaccacactctaccagtaccaatttactgtattagtcctttcttacactgctaatgaagacatackcgagactaggtaatttataaatggaagaggtttaattgacacacagttcagtatggctgggagggcctcgggaaacttagaatcatggcagaaggagaaataaacacatccttcttcacatggcagtaggacgaagaagtgcagagcaaaggagtgaggggaagccccttattaaaccatcaggtctcatgagaactcactatcacaagaatggcctggaggtaaccaccctcatgattcaattccctcccactgagtccctcccatgagatgtggggattgtgggagctacagttcaaaatgatatttgggtggggacatagccaaaccatatcagatggagaaatggtcattttgatttgacaacatgggggttaacttgacaaaagcagttttcataaaagagtgaggggaaagcctaattggagtaggttcagwaaagaatgaaaggaaggcaagtggattcagcaaatacagataatagtttcactgaattttactgtagaatggtgaaagttgatttttaaaatatttgttagagaatctcagaagacttttcataagatagaatgtgatagccatctactggattattctctggtaaaattgaaaatgtaggtatgtgaggaaaacaagttccaagtgtgtcctttattaggtgaaggagatgggaacttatgcacaagtgggtgttggtcttatatactaacaacaataaatgctgaaacaaagattaaaggagtcagtagattgttggaagttgtatagaagtttgtgaagttctccaattgtcttttctattttctttgtgagataagaactattttatcaaataaaagttaagagaagagggggtattgcagtttttaggaaagatacatgaattagtcatgttcttgaaaggyaggattgaagaggacaatctaatagtatagcatgctgcctgagattcacttgaggcttatcgttaaccatttaaaatgagtctaattgacaataagctaactttcagcattctggtagcttttagcacttttgcaatagaagtatcagtgagttagattttagcaggttggaactttcttttttggacacagacaatggcaggagaaaggaacaaagaagtgaagaatttttcaaagcaatgcttttaatggcaatgaaatgcaagacagataatgaaggaatagatgaatatgagagggcttatatcctggagtatcacaggaaattgtaggattgaagaattgttgatgtgggtaagagaagaaataggcttgaaaaagtagggtagtggtcagagctcaggatgtttgaagttaagacattggcaagtgtgcaattattcttaagacaaatgagagaaaatgattattgcaagtgagaaatgaaaaggattgaaaggccaaggaattgggtggactatcaatgtacatgttgatatcaaaaagaatagtaggggagagagacagagatttagctggatacaaaaccttcaaatattatgtcaatggtacactgtctttttcttgttattcagcatttcaattctttttgcaccagttgtctctctgggattgtaggcaagcaataagggcagatattgaaattttatggtcaacaccagatattcaaagtgtcctacagtgctttatgggcttcatggtttatgaggcaatttcatatgcattatcttatttatttttatagttatctagtgagacaattagagatgatatcgttataaaaggtttatagatgaggaaattgaagtttgattatattaaatcatttgccactatatctatggctggaaaatgatttaaaaaatttttccatgagaccaatttccacatggatatgttctgagaatggtaaatggaagtttattgagtatcacaaccaaatatattgacctcattctttgacatgtttataaagcccctgcctttgcctgaatatttgtatgcaatggaattttaaaaaattcttaaacatatttgattttgttttcagaatacattttaattttttctgccctttgctgagataaacactaagtattttgttttaagcacacatagtaattcataacatgttagttattgtagtaatgcattattaagagtatacactttgtttaaaaggaactagactaactatacttataaatacagatgtaaaagagtaaataaaatagtggaagcaacaattcaatagaattaaaatactgtcacaatgagaatatattaaatatacaaggaaatctagttattttgtctaatcataaaagccttaagatactataaatggaatatgaaaaaagcatgaagccttcgatatctgttcttttttaaaagaaaagaaattgctgtgaaaactagtaatagaaaaatgctctcatttgctaatgaagaaaatttgtcttaaagaattaaagccattcataatgataagattctagaggcattcttgaagactcagcaacgaaataaactaacacaggaacagaaaaccaaacaccgcatgttctcactcataagtgggagttgaacaaagagaacatatgggcacagggaggggaacatcacacactgaagcctgtcggggggtggggggctaggagagkgatagcattaggggaaatacttaatgtagatgatgggttgatgggtgcagcaaaccaccatggcaggtgtatacctgtgtaacaaacctgcatgttctgcacatgtatacccaaacttaaagtataataataataataaaagaatgtttattccttarttttatttagaatttacccagaaattcaaarccaatgcagtatgtcctgaggattaagttttttgtgtcaacttaactgggcaaagggatgccttatagccaatgaagcattatttctgggtatctttatgagtttgtttccagaagagattagcatttgaataggtagactgagtaaagaagaccacccctccaccagtgtgggtgggcatcatccaatccattgatggcctgaatagaacaaaaaggtacaggaagggaaaattccgtctctcttcttgagctggggcgtctgatttttttctgctctgggacatcaggcctttggaatcggaccagaacttatatcattggctcccctggtactcaggtctttggactttgaattatgcccctggcttttctgattccccagcctgcaggtggcagatcatggaaattctcagcctctataattgtgtgagccaatttccatratatatacatatatcaataggaaattggtatttggagaaccctgwctaatatggacattatacagaatcaagaattctacttcttcaaaaggaagaggaaaaataatctttcttttttcaactatcatattcctagaatatcaacagacatcaagtaaatgcttcttacattaataaggaatacaatgaccagatgcattttaaatgaaaaaaatcaacatctctcttatatcctatyaataacctgttagaaagtgtgatgggttaaaaaataccctctttataatggaaccattacattctttagaacaattctaactaaaaaaaaagtaccttttttaagaaaattacaggattccactgaaagactgagaacaagattttaataaaagacacacttattgacaggaagactgaaaaagtataaaaaggcaaatttttcttaaattaactaaacttcacttaaattaatatccatttataacttaaaatgcattattagcaaactaagcatataagagaatttatctaatctggtaataagtgctttataaaatgcagcagatacacttaacagtgaattgctaaaagttttcttcctggatttgggaaaaaagcaaagatgcctagttgtttttcatactgaaaataatttctgttattcaatattgtactgatattcctatctagtgcaagacaataaaaagaaaaaagacataaagtttagaaagaaaaggtaagattcaatatttgcagatgacataaattctgtgtaaagatattccaaaagaaattacagataaactattagaatcaataagtttaasaagttcactgaatataagatcaatatacaaaattacatttctatatagaaggaatgaatacataaaaataaaaatataaaatttacaacagcataaatatcaaataactaaaaatatatctaacaaaataaatgacctctacatcgaaaactacaaaatagtagagaaacgaattaaagaggacttaagtaaatggaagtatataaaaattcatggatcagaagattcaattttataaagatatcaaataccgagattgagctatacattaatgcaatcctaatcaaaatcccagtagggatgtgtgtgtgtgtgtgtgtgtgtgtgkatcgaaaactggcaagctgactctaaaatttttatggaattatacaggaccaagaagagcgaagacagtctggagaaaaaaattaagttggaagacatatactaccaagtattgaggtttgctatcaaattatgcagtaacaaagcagcaggtattgatacaaggatggaaaaatagcccaatggaatggaatagaattgagaaacagaccccgtcatatatgttcatctgattcatgataatggtcacaatggagggttgtggaaattctttttcaacatatgtagctgagagaatttgattatcaaaaaaaatatgctaggagagtaaggaaaaaataatctgaaagtgcaaaacttaccggtattattaagtacacagaaaaacacagactattataatactgtaattgtcatgtgtaaactacccatcttgagtaaaaagactaagaaatgaagattaaaaataacaactacaacaacttttcaagacatagacaatacactaagatatacatggaaacaacaaaaacctcaaaagtggggggatgaagttaaagtttagagtttttaatagttttctctttgcttattagtttgtttatgtaataagcattacattgtcatgagtttaaaataatagctgtcatcagtctaaaaaaataagatgatatttgcaagcctcgtggcaacctcaaatcaaaaagcatacaacagataaacaatgaaaaattagcaaaaaattaaaacataccaacagagaaaaatcacctccactgaaaggaagtcaggaaggaaggaagagaagaccacaaaacaatcagaaaacaaataacaaaatggcaagagtaagtccttacttatcaataaagtaacattgaatgtaaataggctaaaatcttcaatcaaaagacagagtgacagaatcgattcaaaaatcataaaaataataaaaaactacaagacccaatgatctgttgcccacaagaaacacacttcaccataaagatgcatagactgaaaataaaggaatggtaaaatacattccatgcaaaytggaaccaaaaaggaacaagggtagctatacgtttatcagacaaaatagatttcaagacaaaaactataaaaagatggcaagccacacagtaaaagaagtggaagatatttgcattatacatrcaagaaacttgtatccataatatgtaatggaggagctaaagttgataagaaaaaagataaatgactcaatagaaaatgggcaaaaaatttgatcactttcagaagaagatactcaaatgctcaataattataggaaaagcaattcagcttctttaatcatagaaaactgcaatttaaaactgtaactatattttatgtagtagaaacacagcataatggcaaaaataaaaatgtatatatataaacactatatttaaatgaagacaaatttgtagttattttttttcttagatattcagagattggcaatagttgtttccagagacaaagaagttggttacaggcagtgtcagatttgaactagctgagggaaagaggtcaaaagagaaagttgtacatcaggcacaagtgcaaagctgctgacataggaattttaggctattaacttgacagcccaacttccttttggaaatgctgttatatagacttcctttcctataaactccctctggtactgaaggctatatgaagtacctgaaatgattcttccttgaaaatttaataaaaagcctagcttggtgctttctttccctaaccaaagaccgaggtcactgaacctaggaataaatttaatggcttgggattatatttgatagactagacactttgttagaacatcgtattaatgtgcacaaggtcaatcgttacaatccatctgaggatactgtaatttcatttttctgccatagccatggaaatcatctgtcatccttctcagttttcacttgttccttagtcagaggggctgactaaccagttatacgatacgtatccaccacttgtaggaaaataattcaaagtatatgcactgagtatacaattttatttcccactcacatagtagtctgaggtagttyctggttgaatggcaattttcttccatggagtgattcaggaacccctatgtcttccatcctatagytttgcatcccctgatgtctcttcatcataaataatagaatcagcaacaggaggtaagagtttctagggaaaagtgcacacacattaattctgtaaaacacttttatgacatttatcatcttgttcacattatataggttgaaaaccagtcaaataaccacactacatctagtcagaacagtcgatgactggccaggcactccccagaaacaatccaatacaatggaagaaggagtacacattttggtgtcctgttagctacctatgccacatcccttttccctattacaaatgtctgtctttttctcctgagtgtcatcttggtaaaatgctacatttataaagttgcttggtaaaaataataaaaggaaaaagaaagtataggaccattttttgtatcacatcaaaagaaagaatactcaatatttcctccacgacaataaaagttttcacttgagtgcaattattctgaaaactgaagcatcagtagtttgtacatatttggaactcagcctatcagatttactaatggaataatttatccacataattctttactcctactcttaggaacatagttttaataatagcatccagatggccttccaacttaaaaatgttttatgttccaaaattatgctggtaaattgactggtggcatttgagatataattttatacatataatattacatgtgataattgtctttatgccatccacaaacgtctatctaactaattgtctaactgaaatacaggacctttgcaatgaaaactgtagtaaatattgttattgtgatgtgggtaattaccataaaaatcctagaaataaagattcattttgaatataaaatatttaattaaaatttttaacaccataatatataaaacagctattataactgcacataccttgtctgataatagctagatgtgcttttttattactgaggaaaatacaagttaccctatttaatacctatattttcacacttggaaaagttcacattctgtcacagtaaagtgtggtaaaacttaacagcctcagttttaaaatatacttggaacaagtcataactagttttattgcaaaagattcctgtacacatttatattaattttggtaccttgaaaggctgcctggcaagccacttccataaggaaacatgcattatgagaagtgagaaatatccatcccttctacatatttttagttacttgtcactcctcgacaacaatgctcacatcactgaagcatgtgacataactctttatatttattctaagggaaaaatgaaataacttaaaggaaaatgcaatgcaatgtaaacaatctcttactaaaaacaatacattaagccaaaagtattttacagaatgtattacaagaaactaaacacagtattgaagattctagctgtgatcatgagaatgagatgtagaattcatccgaaataacagcatcatttgggattgagagcaagcctaggtaccagagccagaacctccaatgaatgaaggcaactgatggcagatacgggaacaaggatgaaagaaagaggatgtagagttgaatgttaagacagtttcaaaggcaggatattggagaaaaagacaagtctgtaatgacctggaagcagcaaaggtgaataaaggatggtccaaccttatcatcttccctgaggaatatgaattgaagaaataaagacaaccatgacttgaaagtctggggtggaaacaactctcttggaaagagcagtttcagttaagaccacaagggcagaggcagggagaagaggctggggatagagaggagttgtggttgtgggttaggagtacaaagcacactaaaatggatttacaggtgagagatgtataaagaattgagtgattttcaataaaattcagagtattctagttggttcagtggaatattgtgtctgagctgcatcactttgggagcwgactggtgattagaggagtaatctgctgtccttattctcaacagaacacagggcttcagtaagagaagactcagtcagactgctaaygacctaaggactattcaggacctaagaaggttgtccagttgatctgggtgggggcaaaataggtyatctgaacccaggacatcaatgaagttaatgaaactagtagcataaggcactatgctcatcaaaaagagggatatttcagatgatgtctgagttcactgtcctaggagatttagatgcctagggcttctgagtgactaatggctctaaaatatacttacaagtttcttggttctggctcatacttcacaactctcttgttctgagaacttatgtcagttgcagggctaccagcaaggtaatgactgtcatgaaatggtcctagaagctgtctcaaactgttgtgggagggacttcgggctagtttctcattgaaaattgtacataaggcttttctccttcactctcttgtatttagctctttcaggtacctggtcacggtaataatcttaaagccctgtaggtgctttattcagagtaatgcctctgctaaagctggtgaggattttcagccgtagataagattgtgcaacaactaagctctcttttacatcacagagcttatggaataatgtgcaagaagaggactttttgtctgtggtctagagttatgagtrctggtcaaagccttctccacctttcactggtagttatttgagacctacagtttctgaggttgtgattactgggtgttttaaggttttgacctatttgaaatgattttgtcttttcctgaaagctgtcattaccacaaataattgaatcttcaacatggggctcttagtgccaatttgtgtaatcagtacacactgtagcagattactggtctcatattagtgcatgcttcatcttggctaggtatagtgacttggagaggtcaccatatgtatggataaagttttaattttctggagtgcttcagccatagctagtatccaagcagacccatatatctacatcagacatgatagtgaccaattatagaaagttctaaatgtcatgtctgagaattttcctctcttgaaacctggctactttgaccttcatgggaatcttctggaggctccagtcctagcactaagattttcttatacccaggaacatctccctatatattgtctcagagatgtagtaagtctagggctgtcaggatctaggcagacataaaaagagcaggtaaaaatattgctgaatcatggcaggtcatgatccttgagttgtgaaagataccatttatcaaggtgtggaacacagaaagggttctgagtctttgaggctgagttggaagtggttagttgtcttatgctttccaccctttcagatagagttccctttacatcttcctmaactctccttatcatagggctgtccttagtaaaggggccaatcttagcaaatatccaggctccccagagatagcccagggataaggggtgagtggagcctctgcattgccaccgtaattagttttttcagcacgttgggaaaagatacccaccattattttcttcctttcaaatagcagcaagacactataaaatattagaagaggagattaaacatcagaaaaattgtctctgccactatatttgccatgcacttgcatcrctaattctgaaaaggactgtaccctacctaatacacaatgaaaagcaaaataaaaatgctgatgtaagtgtcagaggatgagaggtaggggaacagcataggagctgggggtgaatactttccttgttttccttgttctcactccatggtttagtaaaaagaaccctggctctctctcaggcagggtcatcatcattctgtcagtcacgtactacctttctgatttactcaccatagttttagttccatatagttttgttttgttttctcacttctaatatctatttcctgggcaatcttgcattttttctagatgtatatatttattggtgtaaagttatgcaaaatttgcttttagaattaaaaaaactaatttgtactggtacttacatcttatttttcatttctatgtggacttatcatattaccaaatatgatatggtttatgagtactatagttttctgtcttatcgctttcttcttttatatcaaatactttcttctttctctgttgagtttactttttttttttctattaaagtttacctagttccatgattaatttttgagatttcctgcatcctaagattgccattttggactttaaattttccttcaagcaccacttaggttgtatccacaagttttcatacatactgttttcatgattattcaatttctaaatagtttgtactttcctttttataggagttacttacagggatgatatttggtttccaaataaaaactcatatttatttataaattataattttaatttgattacctttttaggtgaaaggatatagtctcatgtttcctgttatgaaaattttatttttgttgctggataacctaattcataattgatctctgtgaagctcatttatgttttaaaataatgcagtgaaaatgataattttattactgacttattcaaactattcttaattatatattgtataatcaaatttctatctttgaaaagatgaattaaaatctctcatgatggttatggatttgtctatccttgcatttctataatgcgttgcttacatacattgtgataatggattaattgtatgtgtgtatatatattctttgcataatttaatgattatatcttgcattctattttgtcctatattaatattactttccagatttctttgtttacattttcctggcatagaaaatgtattttcaacttggcttattataatctttatatatgcttttctcttttgagaatacaatttaaaatcaaacctgataatatctgtatttaaatagggaatttagtrtttataatgaaaattaatgatttatgtttgctaatgttttctgttttctttttactatgttctcatgtttctttttttgtcttctctgaaattattttaactgatcaagttttctctcattttttttcatttgatagttcaggagttttagatmctattttcatttttttctaagttgctcttaaactttaaacatacactttatttttttttttggctaacaacatttagaagtaatttgctggcatatttttaaaatcttatatcacatcttcttccctttttaggaataattaccaaattattggtaatttatgtcttgtttcttgttttcttggtcarccttgtgagtggtttaattttacagtctttccaaagatttttttttttagctttgttgattttctttatgttacatttgtgttctattttattgacttttatctttattatttccttccttctatattgattggatttaattttctctcccttttctttagttttttgagatgaataatcatatcaagatttcttcttttgtgtctgctttagcccatgacttttgatatgttgtatcttattattcagttcaaaatatttgctaatttccattgtttttcttttgacttatgagtgatttagaaatgtattgtttaattttcaaacagttggcaattttcttttgttatttatttccaacctagttctattttctaatctgatttcacattagtcagatagcataccctgtatttaaatccttgaaattttttaggatttcccagaatgtggccatctggtaatttttttctgtacaatttaatagattatttttcataagttttggaaaattattgtccagtgtctcttttaagtgtttctttttatctattatatctctcctttctttctaggacttaagattcatgtttattcaaattttgtatcatgttttatatatctccaataatttctttctgaattttaaaaatatttatagtctccatccttcaccgtggatattttttttactgatttatctttaatgcatcagtcatttcctgccatgtagctaattagttattaaactcatmtattcaattcaattattatatttttcactcctataatttttgacttcaatacacacacacacasgcacacacacagacacattccagtcctctgatgaaaatatcgtattatgtattttcttcaatacatttatgttaaagttttgtctgagaagcctggttctgatcatctgtggcaccatttctgtcacctgtttagtttttgttgttgtttgcccacggtttttggtcatttgtttttgtgtcctagcatgcctggctggtaatcttttattgaataactgacattgtacattttaaaaaaatgtagatgttatatatattgttatttccttctagagaagcttcaattttctactagtcggcaattgaaatatatatatcaagacatttcaccttgatataatctgggattgggataattcgaggataagtttcaggtttttatggatttgtctatttctgatttacctttcctcctcagcaatatccctttagatatattggctaaatgtctgrtattttatgagtaatcattctcctccatggacctgaattctaactgaattctctctgaatctagattatgtttgattttttttttttttttttttttttttttagcttgctgctttcttacacttaggattcagcaaagtctcaagggaaaaaaaaggtataaaatacccggtttacttctctgtagtaccctagaattgtgggtccttaagtcctgattgcaatgataaccccaaattccagattttatctccctagtcccatgagactgctgacaggtctgtctaaagatttctgtctttcctatgtagaatcagtacgttacctgggaataagaggcagtggagagtgctggacatatgtcaatgtgctttctttttccttactaggatcttggtcccctgagtcctggctaccttggttctcctctgacacctccaaatagtcttttttcccttaactttatgattgttttatagttattctcagaagttggtttggtttgattatagctactcctccatagccagaatcagaagtccttcatctactgagattttattttaatgattaaaatgwtagcttatatgaatttatttgatatttttatggatttgttatttttttttcaaaacttctctaagataacaataattttaattccacagtcttccttctttagctctattggatctatttttgtatgtttatattattctctttgtaaggtgtcttgattctccttaagtatttgctaattcttggttgtcagttcatctgtatttgaatccaccttcgcctgcctgctgtattgtcaatagcctgtctctggtgctatagaggtggaatggtgcctatgcagcaatgtcttctgcatgtagggaatccctgttctttctggtggccagtggttcatcagagacttttctgctccaacccagtgcaaactcaatgctaaacatcatttaaaagattaacttatccagctcttcaggcccatattctcagctagattattttgtcaagtttaagaagatgtaattataagaaagccagagctgttctaggatccacatgaggcttttatttatgaagaaagtagctgattaataacagcagaaaccctctaatgcacaactaaatattaattgaagtgctttaactgtgcctctattatttagaagaaatttggcccaaatctattagaaaagggatgcttctctgatttggagaggactcaagtcacattaatcctgctctttcacttctcggtgtatttatgggggccagatggtgtgtggtaaggatatgggctttcaaattagagaaacctcagtttgaatctacactttattttcatgtattgtatgacttttcaaaagtgactgtgtctcaaaaatgacttcytcgtgactgtgtaattctcaaaaatagacttattcattcctaccttacaggattagtgtgaggggttaaataagtgcataaaagttttggcataatgctgtacttgatcctcaataattgatagatgttatggttgtagttattgtacagtatctaaactcatcgttttaatcaatatcagacatctttgagattctattggtatatttaaccacaaccaactactatcacagaactttcagaactttttcagtgatatcaactccccattcctgttagttttccagggctgtatcacacacagggtggtttaaacaatagaaatcaatttcctcatactgctggatactagaagtctgagatcaaggtgtcaacaaggttattttcctctgaggcctctctccatggcttatggcttgtagatggccatcttttccctgtgttatcacgtgattttccttctgtgtgtcttgtgtcctaatttcttctccttataagcccatcaggcatatgggattagggaccaccaaaatgacctgattgtaacttaattacctctttaaagaccccgtcttcaaatgcagtcacattctgaggtactgggggttaggccttcgaaatacaaatgttggaggagacacaattcagcccatarcaccatttttcttgattcttactatattaagggatatcaccagaaaaaaaaaaatagcmcttttaaaacatcatgtgcctccgcaaaagcacctgcactgagttactgaatcaattattttgtctttaaaaagggttatagagaaaatatctatctgaccaagatttagtgcctttcgcaaaactacagttgaaaccattttcataattttaccaactttccttagataacacaacctgaatttattatttagcctaaaatttaaattctagcaaggcttccgtctctaggcagtgataaatataggattcaacatattttctcttttcctggcttctagaactatagacagatagatagagatagagatactttaaaatatagttcagagataaattttgttcctgaaacaattgtttcctcttccttgcttctttctaaactaatttatacttttatttatttgttctctacctgaaaatattattatattttgatatccgttcaaatgataataattaaagacatccccattgctgttattcccagttctgtccatgctgctgcagtgataaagggccaaaagttaccatggaagcagaaatccacgaaggaaaacatgagcaaaaatacctgtaaaggaggaattaataagcactgagagagtagacaccttgtattaattttcatatacatatcccagtagaaaatgcaacatcagtttacttatttactatatttctgtaaataattctcatatataataattgaaaattaaagaccacattttatttaataatgccatagttttaaaaatttactctgtttttaaattttccatcaggctttaataaaaacaaattatttactaatccaaatattaaagatcacttatgtttaattatagtcattgtaaatcagatagattttctccttctttaacagatcttgagcttccttacgtggttctttcctatcattagagaagctgatattctgcttgttggttgatgctgtatcattctctttagctrgtttccacctctcccaatcattccaaggttaagggttcagaaagacctcacaggagggagaacaagccctgctctgcatctgtagtcttccttcacaattctttattcgtagcttttgatttgactcttcatgttgcaaatatgtgtcctgagccgaaaggggatgtgataagtgactgcaaatggattacagacaactggtctccacctccactaatgaaaacacagtgcaatgtatctgacctgctgctgggtcagcagcactgtgatttctacctgacaggagaaacacaacactcaggacggtgatttttcccagagttaaattggactataattctttgctgtggtgactctaaagtttcccacaaacataaagtatatttccttatgaataaaccattttgcttgtatgtgtgtgtgtgtgtgtgtgtgtgtgtgtgtgtgtgtgtttctgctataaaggctaaaagtcttgaagctgattttgagagagaagtagtgttaagcgtttctgacgtggagaatgaaggaagatgaatagagaacaggttgtcaaggttaaataatgacaataaagctatcccttattaattaatatatcccaggctctgtgccactgtgtatatatgttgtctcactaaatcctttgatttaagtctatgaaarcttagaagtaatgtgagtgcctgaccctcagttatacagttaacttgttttgagggcagatcccagagctctcctattcccaaagtgaaaacgactgactttgaattatactgttcattgctgatggagagcaaaatggcccattattaccaagtttactgtttaaaagggcattatgtttatctgcccaagattacatttctctcccagcctagagattgctatgaaaaagaatggagtcctccagtcctccagttttctgatattttgtagtttcagtatctgtttttttttttccttcttggaaatacatgagttatattccttaaaacccaaatttgggagtatgaactcacaccaactcaaaagattatagasaatgtctgttatccaaacagttttctttcctttttttttttttattatactttaagttttacggtacrtgtgcacaacatgcaggttagttacatatgtatacatgtgccatrttggtgtgctgcacccattaactcatcatttacattaggtatatctcctaatgctatccctcccccctccccccaccccacaacaggccctggggtgtgatgttccccttcctgggtccaagtgttctcattgttcaattcccacctatgagtgagaacataccatgtttggttttttgtccttgtgatagtttgctgagaatgatggtttccagcttcatccatgtccctacaaaggacatgaactcatcattttttatggctgcatagtattccatagtgtatatgtgccacattttcttaatccagacagttttctaagtgctgagtttacagccgtgaacaacacaggtaaaattcccaatattcatggaatttttattctagctaggggaaataggtaccacatacattaaatgagtaaaatatatagacttttaggatataatgtgttagatactaaggagtgtgataaagctaggaatactggtagaaggttgggggttacaattttcaatggtgtgttcaggaaaggtctcactgagctggggcatttcagtaaagacttgaaggcagtgaagaggcaagccaccagatataaaagtctggaagtagaagcatgcctggtatgttccaagatcagccagggagccagtatgggtggaagggaatgagtaaaaaaagagtaaaccagaggagttctcagaggatcttgtggaccattgtcaagatacaatcaatgggaagtcattggagagtaggctttggagagtaggagtgacctaattcagtttatgaataatgggattattctagcttctgtgttaggatcaatcaaatgctcaaacagaagagagcaagggcagcaggaaagagaacactaggacagttacagtactgatccaaatgagagatgatgatggctctgagcaatgtaacaccagtggagacattctgaaagttctgagcaaattttgaaggtagaatcaataggatatggtcatagatagggtgggagtataaaaaaggagtaaaasacaatttcaagttccctgtccacctgctctcccaaraactagaagcacggtattaatgagatagggtagaccactgggaratcaagtttagggatgaagattgggaatcagaggcttgttaagtttcagatgctgtcaggcaccgaagggagtgacccaaaaracaaatgcctttcctaaraaaagcccggaatttgtcagtatataagtgatttttaaaagaggactagctatataatttgtggaacccagtaagaaatgaaaatgcaggagtctttctttaacaattattacagacttcaaaacattcgtggcagagcattaaaccaagcatggggcccttctattacagggtcttgtgtacaagtgcacacccatgaagcttgtcttggtttaagggtgtaattctaatatgatcagcaagcgagtaagagacagagagaaaaagactaagcaatgaaactaggaagatatttaatgtaaacaagacaggaacaaaataaaaacgtttgatatgagcttggtagtggtttcaggctcagccagcaaagctgaatggttgcctctggtttttgcaattttcaattgctaggggaattttatgagtttggacttttgcatgatagattgatttggggtgttaccacccacaggacaactccagtttctctataaacttcttcatctttaaaaaaaaaaaatcacttctagtagtaaatggtattttgaagtccattggctgctaaaaagcaaaagaaaacccattttttgatgcaagtttcactttggcagacacgcagatgaggaagtagaaacagaagcagagaaatacaggctgtcagtgttagtgtagctttctagctggtcaaacrgtatgcaaagcagccaaacagaacctggtgactaaaacaaagtggtaagattaaaccatcgagggcaaaacagaaatagtcaggaataaatactgagtctgtttcttatcacgtggcataaagttgctttgagtgttaggtttcataatagtttaccttagttactaaggggttgcaaaaataccaggttggatgtcagagtctgtggtggtctgtgcactggcagctggttgaaagcaaaagactgacctttatcctggaaaaataaaatctcctccctcctcactcttcctggagtctttaatgataccacatcatgrcctacgttgagtagaccttgatatgtacaaatgacctatccagagtttgaagagggaactgtaataggtcccagaaaagatttcatattagtatgctccattgtcacagctcacccctggcttatctagagattgcttaaatctgcttcagggcatctgactgcttcaggttcaaaatgtccatggggcatggaggcagagtaagtaacaagccatcagtgcgtgtgatagaaaagatagtccccatcctctgggtgttagtattttggagtgacagggccaggagggagcacgtaagagaaggctgggaaagagaagattattattgacatatccaatatcattgctagcatctcttgaatttttgtgggttagtgggagttaatacagtcccctcctgcattctgatgagctgtaactttgagataaagagctgttatattattctaagcatgtggcccaggcagtaaatatggtcttgagttcacatttggacaaaattttattctgtctacattraagtgagattacaaaggccttttcctcaacatcgtatagtcagagcctggctatcagctcttctctaaacaaaactggtttgaataagtgtgtaataggtccttcttttgtcctatactcctgggaggatactttgttagcatatttttagatgcaaagttgtagggtaaagaatgtttcttgagctatcttgtrtctgtragagattttataaatatatcatgctaccctgtaactcctctatgagaaaagtattacccccaaccccaccctgtgacatagataagaacttactgttcagagaagaaaataagataccatatttgtccaataaccagggaagattgattrgtttagattgtagcctgggaggttggtttggggactttaatcacccagaaaataactctagagtttctctgtaaactttatcttttwaaaaaatgtatttaagtggtggttcagaattcatacccaggtctactggaacatattccttccatggccctgtaacaaatgctaggccactgtaaggttgtggacttagggtatgattttgtggatttctttaacttttattttaagttcagggatacaagtgcaggtttgttatataggtaaacttgtgccatgggggtttgttgtacagattatttttatcacccatgtattaagcctagtacctgttattatttttcctgatcctctccttcctcccaccctccaccctccaaaaggccccagtgtgtgttgttcccctctatgtctccatgtgttcttatcatttagctcccacttataagtgagaacaagcagtatttggttttctattcttctgttagtttgctaaggattttgttagatgcctttcctgtattaaactcacattaaaatttttcagaagctgtcttaagaaagtacataattaagatcagcattttggtataatttgaaagtatagcgtccaatgaagagcttgctacactaaccatggtactatttaattctaatatctgtgtttattacatctttcattgagttggcttgccaaaaggatagactgcggtaatttatttaacgaggaagctagcattccaaagtcctcttcatgtctaatatttggcaggattaaatttactatatatcgcagaaattattccaaataagagaagactattatttatatttttggtaacagagaaaatgtataggatgtttattacaaaaatatttttatactatttggactagtactatacatgttagcaagactaacagattaaggcacatttaaaaaatccaactaatcagtatagatgttcccatcattttatggctgtttcgtcgttggatttgtttgtttgtttttaggctaaattgacttgaaagagtctgactggtggttttctatttgactggcattggaacatgtatgggtgtggtttgtactttgccacattcttttcttacctttatgtcctctctctgcagtcaattttctatgtaggtttttgcagcaatgctagcttgaaaataagcaggaattcaaaaaagattaaccaatacttaggaagcttaggaatgtttaaaataataggttgcttaaaagtagatggcaaaacttaggagatttataagccgtaaacgtacacatccctatttcattgggatggtcttaattgtagtaaatcttgtaaactttgtagtaaatctcgttaaagcattttccacacttaaacaatgagctcttatgcaaggatgcaaggacagccttagtggcagatgaactgggcagtaaattcagcagtgtgcatggtatgattttatatccaaagacagtttcttaacttgtgcctcacatcctgctcatggtttggacagttctttaccgcaaggttttgccatctgttaagagaaaccttctcctctaggaaaaggcaacactaatgctgattcagttatttacccttgagggcgaatggttttttttgttttgttttgttttgttttgtttttgattctttatttaaaaggacacaattagtttggtcttgaggattgccagatgagatctaactagtatgatagatgttakcaagactaacagattaaaacatatttaaaaaatccaactaatcaggatcatattcagagatgtaaatagagtgaacagatctattaatgagggtcgtagatatgacaaagggagaatctctttacagtcttaagatgtggtttctccgtggcctcagtatcccaagttatttggggaaaattctattttgagctcaggacatgaaaagtggaaccagatcaaaggtttttgtttctgtttttaaagaatgaaatactgctgtttctgtttctataccataaccaaaaaagaaaaagccaaagcagtgattttagctttggtttttttttcagattcttaacctctagcttgtagaaagaaaaaccttccagaaagagctctctctgtaagtatcagagcagtcgatttcagtgggataagggcaagcaatgagcacagggggagaatttcagaatgcagtgaccgggaccatatcccagtgcatatatcttggagggaggagatcttacatattttataaaagcacctgacttatttcgatatgatgctatcactgagaaccttctggaagtgttctttagagggactgttaaaaaaaatcaagcccttatgacatgcttgtgatttttggtagttggaattatgtaatgatgtgaagatgcaaccactagcattattcaagcacwggtgtgtaatagtgatgttctggaatgttgcactcccactctattttcactatgtatacttaccttctgggttaaacttattgctacaataacacttggcccactagtaccttctaaagaagttctgtgtggcattaagtgttagtgttttgccagactggtttggtccccttccttatgtatgtttatttataatctaaaaaggaaaataaactccaccagcttggttgtttgtatttttattttaataaattgggttcaataaaaaaataaccttactcatttacatttgcaggttaggacacaggaatggttgactataattaaggacaatttcaataagtgccttttaatgtgcctttagcagagaagctggaacaattttagaaaatagtatgttatttgctttatctcctactgttaggcttaccaacagtgattcttttttttttcttccctcagatgtacatccagacaacaacacttactgtytccatgagtttaagtgcttcagtatctctgggcatgctctatatgcccaaggtttatattataatttttcatccagaacagaatgttcaaaaacgcaagaggagcttcaaggctgtggtgacagctgccaccatgcaaagcaaactgatccaaaaaggaaatgacagaccaaatggcgaggtgaaaagtgaactctgtgagagtcttgaaaccaacagtaagtcatctgtagagtttccgatggtcaagagcgggagcacttcctaatagatgtacgttgaacattcttctcctagtcttggggattgtgctacatgtttccaggggcatgatggtactcacataccgtgacaccatcacatttaaaaccattcgaagcaaatggtctcaagatgagcggctgttctacagagtacaaacttgctcacaaaatctcttttacaaagcatgacattcagatctttcttttgaagcattacaaagcttgrtatttgaaagcgtcatcttcttataaaaattatcttttagtacttggaaacaattccacaatttttcttgttccatactgggtgctttttatagtatcagtagtttgctgatacttacagaatatcactrcagatcttacacatataaatgatgttatttgtgcctttagggaaatgagaactctagttagccaatatgtttagttaagtcacagttaatacttgtttctcccacgtggtcccctttccttgggcttcctgagggcttcccttgacttcccttcttggatatattaagataattaaagttcttctttaaaagcctcatgatcctggaaatagaatcttttctacaaccacctttccatttttcttttctttacctattttcgtctctacagtccacccaggaaaaagcacatgataacaatacacagaaatctgtgctcaaccagtagaatttaactgatctattgaagcccatcttggtatctatgaaagagtggcaaataatttgaagatttgtatggtaaaataccaggaagctgaatatggtaaacattacaacctttaccttactaggttctacagatgaatcaaaaaagaaagaaaagcaaaggtacttgtattagagtggcttccagtcttttggaatatagcatagggattcaatatttgttttttctgtttgaaacaggagcttgctctgttgcccagactggagtgcagtggtatgatctaggctcactgcagcctctacctcctgggttcaagtgatcctcccacctcagccttccaaatagctaggactgcaggcatgtgctgtcatgcccagctaattttgtttgtttgtttgtttgtttgtttgttttgtagagacagggtctcactctgttgcccaggctggtctctaactcctaggctcaagtgatcctcccacctaagcctccaaaagtgctaggattgcaggtgtgagttaccacacccgrtcaggcattaaggacaaaatcctatgcaaaaatattctcttcctctcatattcatccagcagtctgtatcccctactctccatacttttgacactaaatataagaaaaaactaaaaattaattttatttggtttaattattatagcaacttatggtctacattccatctacaaaccttcttttctatcaagatttctagataagcattgtctactctaatttaccatacacagaactatcctgtgatagttaattagcattgcttaattagacatattggtttcagttactatcagcttacctggaatcattagccagattggttctaaaaagattatcttcgggtcaccaataccaaatttagtcacgtgtagagaaatgaaccttacaagaatttcacaaacaccctccacatattcacctttctgcaaacatgaaaccttgtgaagtaagaaatatgcgaagcaaggtaaggatgggctttagtaacaaatcattacaatcatctctgagtataggtaagcaatttactaatgataaacctatttcggctcttagcaaaaggtatackgtaactgccattaaaggcatcaaagtagaatgcttgtgatttgaggacagaattttaccttttttcctaccttgacagcattagtgtaggaagttgaaagctattataggatgccaataaactgctgttggccagtgatgtaatttgaacactggcacttctcactatgactcaccagagtctattgttttacctgtttttctcttttttttttcttttttagcagcaatccagaaaactttataaaatatggttgccaaatwaaagaaccaaacttatagtgatataaataccagtcattcagactcacctttggaaagtggtggagaaaaaatttaataaactttttcaccactttaaaagaataaatacatgccctgaaaaacaaaattctcagtattgataagaaccaatctcatattattgaagyaaatctcatacagatactgttttcctttggttattttctattaatgttgaaatggaaattatatagcctgcatgtatttctctattttctctaaaataagaatgaaagattgcaaaaacaaggcctatttggagggtaagcctataatattctggaggagtcagatgctcacgtttagaaggtgaagtaaagtcaaaaagtaaatcaagataatatcagttactgcctgaaaaaaaagtttaattgtactttggagattttagtgcattgatcttttacaggagtataatttaggtttgaataagttgggccgaagtaaagtgattacagtgtactcattcaggagagaaagatgtgtgacatcttcacacatccttccacaatcctactccagatcaccatttttaacctttgttcacttccatggccatcctacaatgaaagggtagatctgtgttcaagattttaaagtttcaaaagctacacagagtaaatataagtaatacgaagctggatgggaaaccaatgagtgttgtgttagttgctgaatttgcagactatagtttacatttttaaaaaaggtcaagtgttatttcacaacagagtgcgaggggagttagaaacaaagttgatatatatgaattttgccaactgtacccaattaacaaatgctgtacatagtattctttaagctatgttcatgaataattcatgaaaacagctgctgctggaggtagatttgttttttctagcttatgaacacagtgtgatgcacacaaggaaattaatttactgttgctgtgctcaaaaactgattttcatatgagcatattcatcagcaccgtgaaaaacatctccctatgaactcattggtacatctctgattcattttgctctataatacttctgggataaagattcttgcgaggtatctgccatccacaaagtttgtcccttatcattgctttcatgttgactaaatcatctgattccagaaccttacacttccttttctaaccagtaggaaaattagcattgctgtccttttgtgaattgttttctcaattctcaatagaattctaccattttctttctagaaaccaygtttaagagttcaaaaaataatatgttaatttttaattagctacagagccccaaagttagaaagatccttaaaactgatctaatccaaactgccatctgttgaatggacatcttctgaaaactttattgttcaagatctatcagctcttgctactctatttcaaccataattctttttctagctatatacaaattttataactatttcatacattttagttattgttgaaaatattgaacagtgtaggaagttggatgacccttttaacagtcatttttatcactcttatgacaatttttctccaccttgtctgtgaagattatatgaaagtccttcaaaagcagaactgaaggacagattttattttcttagaggaaatttagaggcatacgagagtattatataaattaaaaatagaaagtaaaagtgagtgatcatagaaaatcattgtgtttcacttcacaccaaaccaaatgtaacaaatattttaccttttggaaaggttaagtagaaagtaagactccattaggtctcatgtatggttcatggaaagaaaagaaaataaggaaggaagaaaggaagggagatagggaggaaaggagggagggagrctsgttctatattggttcttccagactacagctgttccatcccgatctattctgcttttgaccttacaggaacacagtattgtaggttttgaaccagtgataaaactgaggcccagtaacctggcccaatgattttttttttcacgcattttgcagggaatagaatgtaatttaaaaccaggtctaaagtctacttcctttgcagggtgccacaataataacctagaargataagcaatgtagataagataagcagatatgtcaactatttttagcctgaagctcataatattcaatgaaataaaaaataacaacaatgaaaaaaacatctatagtagcacttcttagggctatctgagttaattttagtggttgtgaactttgtatgaacttggtctctggtaagaacttgtctaatccatcaatagtgtcactaagatggaatgagtctgattgtcagttatttcygaggaggaactttacaatttctagtcttattcaatgttcaataaataaattattttctaaaaatctgtttcatcctgaattggattcatatattgaaacacatacattctttgctttttaaagtatcttttatcttacgattattcattccagaattacatgaaaaaataggacatcacatttgaattttaggacagagattcattgcatcacatctttcaacaatacaaaggaattatttggatttagatttatattctccagaagcttaggcatgagtataaatttggcataatatctctgtaatggccttacaataatgagttttactttacagtatgttggcaacagaacaattaaacatttctttatttgagtctttattttcttaaattttatcttcatttgtctccttttgatgaaaccaaaagaaaccataaatatgcattggcaattcacatgttttctatatatttgatattttagcatgtttacctctagagtctaagattattgtgtatttttaagtggaagaggtattcattctcataggacagctaattataattacttacctttcttggtcattacatcagcctctaagaattgaggtctttgacttaggtagtaaaaaatattttttatattttgtaggacagataattgatctgttctttcattttacatatgtgcaaatgtaaaattttaccaaaatattaaagattagcacttttatatttttagttttctagtaaatatttatatactataaatgaggctactgattttgacagattaaaattgctgcagcatttttgtttctactgtcatttaatttttactacagtcatggattgcttgatgacatgttctaagaaatgtgttgttaggcaattttgtctttgcgcaaacatcatacagtgtacttacacaaaccaaatggtatagcytaygacacacccaggcaatatggtgtagcctagtctatctaagctacaaacctgtacagcatgttactgtcctgaattgtgtacacarttgtaatgcaatgatatttgtatatctaaacatatctaaacatagtaaagatacagtaaaaatagagtatacaagataaaaaatggtatacatgtaaatagggaacttactatgaatggagcttgtaggactagaagttgccctggatctttaagtgaatgagtggtgattgaatgtgaagtcctaggacatggcagtactgtaaattttttttttttttttttttttttgagatggagtcttgctctgttgcctaggctggtgtgcagtggcgcgatctcggctcactggaacctctgcctctcggttcaagcaattctcctgcctcagcctcctgagtaattgggattacaggcatgtgccactatgctcggctaatttttgtatttttagtagacacaggatttcaccatgctggtcaagcttgtctcaaactcctgacctcgtgatccacctgcctaggcctcccaaagtgctgggattacagacgtgagtctctgcacccagccactgtagatattataaaaactctacacttagactacactaaatttattttaaacatttcctttttcaatatatactattttagcttactataaattttactttatgaactttttattctttttaaattttgacttgtttgtaataaaaacttaaaacacaaacacattgtccagctataaaaaatattttctttatacccttactcaaggatagacttttttctatttttatttattcattttactttttaaacttcttgtattaaaaactaagacacacacacacacacacacacacacacacactagcctaggcctccacagggtcaggattatcaatatcacttccatctccatatcttattccactggaaggtcttaaggggcaataacacacatggagctgtcatctcttgtaatagcaatgccttattcgggaatacccctggaggacctgcctgaggccattttacagttaactttataatgtataagtagaagaagtctactttaaaataatgataaaaagtatagtgtagtaaatatttaaaccagcaacatagtcatttgttatcattatcaagtactatgtactgtatataattgtatgtgctatgctttttcatgactggtagtacaggaaatttgtttacacaacaaaccacaaacatgtgaattatgtgttgtgttatgtgttgtgttgtgttatgtgttcactgggtgataggaatttttcagctccattataatctcatgggaccacctttatataatgcagtctgctgtcgagctcaaatgtcgttgtgctgtgcatgactgtgaatggtttaaaaataatgagtaacatgctgtaaaagctggatattattaaaaagtcattacaggacttgaattttaaaatcatattaacaaaaggatgtattattatatactattttaatttgtcctcatttatcttaacagcttcctctaccaagacaacatatatcakttacagcaatcattcaatctgaaacagggaaatggcacaatctgaagagaygtggtatatgatcttaaatgatgaacatgagaccgcaaaaattcactcctggagatctccgtagactacaatcaatcaaatcaatagtcagtcttgtaaggaacaaaaattagccatgagccaaaagtatcaataaacggggagtgaagaaacccgttttatacaataaaaccaatgagtgtcaagctaaagtattgcttattcatgagcagttaaaacaaatcacaaaaggaaaactaatgttagctcgtgaaaaaaaatgctgttgaaataaataatgtctgatgttattcttgtatttttctgtgattgtgagaactcccgttcctgtcccacattgtttaacttgtataagacaatgagtctgtttcttgtaatggctgaccagattgaagccctgggttgtgctaaaaataaatgcaatgattgatgcatgcaattttttatacaaataatttatttctaataataaaggaatgttttgcaaatgttgagagttgtttcgttccagttttaaagctagggaaaactcttctttctagttggcacttctgctgttttttagctccttctatgaaagccctgatgttctgagaaaatatttctttgaggaatgtgtttttgtacatttgtgtgcataagaggaagactgtcttttattcctatattaaaaagcattatttgtgtaagactttgtgaatatttcaagatttctgtggtagcttttcatagtaactgcttcttttatgaagaatcaagcaatagtttgaggtaaattgctttgagttaattaacaaatgatgaattaaactttactttggagaacagagtatgaaaattaccatttgaaagtacgtcaaaacatgtcactgaaattccccattacattcctaaatcaaaacttttgcataatgaaatatcctgtggtatgtagtattaaccttttctcacctgggcataaaaatcactgaaatcagtgaagtaatgggccttacctagtacattcttcaaagcagagaattagcatatttattcccttggcaccactaaagaagccacagttcagataacatatcagtgctttcttattttccaaatgaaaacattcattggttcatggagcagtatcattaaagagagaggaaacagggagcctgtctcatattaataaaccatgccagaatggataaaaggaagctgataatggctttcaaatctgtaccatttttgtcacgggctcctctatgccatacaatcccagacatccatcaagtcaatggatctccacaatcattttgttagtgaatgttctctctgctgagttagcttggatggctcattgcactccttatagatataaagagctgtctgtgcgctctagcttcaacccagttactgacagttactttatctaatagagaaggttgaagtagcatagygcaggttccttcaacatacagtgacatttcctagatagcacaaagacatattgctgcatgtagacggaaatgtgtatctattggctttttgttgagtttctcctaataataatggttgtttgtagataatatttaaatcaaggagtaagggcattattttcaagttttcagatcatctgaattactgataatgcaatcctgtaatcaggatcctaaacccacttctaggtgtgcctttctagataagacctagactaagcaaagtaaacccattactgcatattaagtatattgcgccatgtaggtcagtaccaatagccatacaagaagtaattataattgtattttaatttttaagttgacaatttttttttcattttggagatcgtttgtggtttataagatgttttttacttcattttaactaagcatctatatgttttgttgagaaaattgcttgaattatataagccttgcatttcattcagagagcaaaactcaagtatrtttttatttactaatttcatttactaattgactctaatcaggttcagtgcatgtgacagggtgattatgagagctaagctggctctctcaggccaaatgtgggttttcattattattgttacttaaaaaaaatgtcgaagttttaggaagaaaaataaaataccaagcataattcatgatatttcaaaattcttcttcctactatcaacctaccracgggttgtttttcctaagtactttaacaaataattgatacttgtttggggttaaacaaaatcttatttaattcacaataaagttaaataatagctcttgtggatttacatataccagtcatcccttgtaacattatctcagtgggaaacattctgctgatgaaactaccacctttttcaggcagtgggaggataaactccctcagcctcttacagtaggagctggagaattcttccttccactgtgtttattttctcagggattttgctgagggcttgagaggtagtcatatagggtgggacaatggcrgygaggtatcctgtaggagggatttagtatgtgccagtagtggatcataagtcccatgctttaaaatgaactgtctgtgtactatagataagcaaatgcaaagttgcatggaaaaatgcactattatattctttagaattgaccttgtgttttattctggccaagaaatgtcattatctaatctcaacatgccagagggaatgctaaaaatgtagcctgaggtaacatgcagcaaaagtcactagtagacaaggagagatatattagtgtgaccttggaccaaatctgacctcagtttttaagatagttctagcttataatggttaatatttaaaaatgtctaaatcaatgataaattgatatgccgcaaactaatcttatttttaaacaaaactactcataaatttaaacttgagggatgactctttgaacatgaacaggaacctaataactcgatttttagtgtttatcataaatttttacacaaaatgtggcatttcagaagaacaagattttgcttttttagaaaattaaataccatattatatgaaatcttactaggaacagaagtttttgtcatttatgttttcttccccttttaacacaatatattatttaccaatatttcttgacagtgtagaaagaatattaacaattttctaaactatattagtcaataccgatgttttattcagtcagcaattggaagaaatcacattcttaaatcctattatgcagccttaccaatttttatcatttcatttttgagtttctcctaatacattcctaaaaaaaaaaattggttgtttgtattttcacccaccttctagaatgaaatggccagaagtaacaatgagaatgcatgcaagaatgagtgagaataccgaattatcgaatacttttcctgtatacagtgatctttagaaatgattctttttgattttttattgttctcctttaatgaagatgaaaatagtgtagaaaaatttgcccacagctagaaaaataaaatatttccttaagaagaaattactgtctatgaatactcagaaagttgcagactgccacttgttaagtgtcatattacagggatagtgggagaaaacagcacataattttattttgtaaaaaacctattttctctgactattttattatagtttttcaaatttttttgtattataatctttagtggtagtgttactttcgggcacctttttaaaaaaaggacattcagaatatttttgttcgttgaactcagtctcttatcaccgtaaagtctaatattttattttgatttatctatctgttttaagagtgacaaggatggacataaacaaatttgaactatgaagtgttttttctagttgcctactgcttaggtggttatggtaaaattaatttttacaaataacttgttacaaagtcataaagtaacaagcatggatcgaggcctatgaaaaaccaagaattaaccatgtaataacttggatgggaagaatgggtgatgcgtttacagaaaacgggaaagacaaatgatgaatgtaatgtttcaggttgtaaagtaagcattatcaggttacttgccaatcgactatgtcccattaggtaaagtcaatagaatataggttaattttgagagctaataaaaaatatcagtgttaaagtataattttgtaaaagttaaaagcaactcttataacaaaagtaaaatgaacacgtcaaggattttattcaactcattacctaatgagggagcaaataagatcttgaaactagtccaaagagcatttgagaagctagttgtatatatatctatatctatatctatatgttatataatataaataaatattgagataaatgagaggattagatacaaaactggtttagtatcctacagtataataataaaccataacatttcaggttatatgttccattggacagacattatttgcatttctactgaatgaaactgtactaagtaacccctatacctagagttgtaaagtagctttgttgatagactcaaatgaagccctctacggaaagaacagccattcatattttttgcctattgctaaattttggataatttctgtgatgagtgataatttrttgctttactttccctaactgtaaacattacattggcaacataggaataataaagatcacaaacacacctaaaattacatgaagataagtcagtaatggagaagctctggtatgkggctgttggaattactctttcctatctcaaatcttaactgtatctccaattcagaactgaattgtgtaaattgataaggtgaataactgggaataaaagtgtacttgccttcagrtaacaccactgacagttccacaaataatttttgaaagtatgacttattccttttgtcccctacataccgccatctctagtgaataatttctctcctcttttgtagtatattcccctaaaatgggaaatcagcttttcaagagtgtccctgaagatgacaaactatggatagtttacttttttccatgagttccttctacttgtcattggctatcaaccctggcccttcctaacaaagtcttcaaatactgacaacttctaggcaggagaagcaagaatgaaagaagccatcttaatcgaagatggggagaggaaacaggtatgattagtggggctctgcttttccataaacatcctagaatttaataacctctgtctatccyttacttctgtctggcatccgaagctctgcagagcaggataatggtgaatgtggggccatgggactctctttccatagggagcctgttttctgaatagaatcttagcagctctgkagctcaatgttccctttgaagatctttactaacctcctggaagaagaaatgaggcagcacaaggcaaaattataaagtagatgaaatgtggcttattgacttttctgttttttggatttttttcccctcatgatgttctccaatttctttttacctcttgccaatgtcacccaggtggccaatatcttcagtatacattctaggtactcagagatccctttcctagtttccatcctctgactcactattactttcctctcttcsaataattcaaccccaattacttttctatgtcaaacttccctccattcccaacacacacagatatcatagaggcatatcaaaggccccaggagaagctgtcacagttggattttaagtaataaacaatataattaaaattgtttaatcatttattttgttcagaaagtactgagtacctgctatgtagcagacattgtgtaggtgctgagaatataacagtagaaaaaaagcattggctgccatcatggcatttatatttctgtagaaaagatgaatagtaaacaagataaatacacaaatgtacggtatgttagaaagcgagaaatgctgagaagaaaaataaatcagggaaaatgatggataggaaaataagaagtaaaattgtgaagtgaagggcagggttgaaatgttaggtaggatggctaagaaagatgacatttgagtacaggtctaaaaagatgaggggttaatctaggcagtgtcttgggaaagagaatttcaagctaagagcgtcaaggagacagcccctgaagcaccagcttgtctagacaaagcaaaggtgaaggaagttaggggtggagtataagatcttgtatggcctggtcagccattgaaagaccttcacatttcacccttagtgataggaaatcattacaggattttgagcagaaaagtaacatcrtaagtattaattttaattgagtttttctgaattatctgaggtgagattagccttaaagaagccaatatcaggaacacagtcttaccttagaagatttttgtataatccaggttagaaatgatcatgactgggactgggcaaagcagtggaggtaatgagaaatggtcagactgtggaaattttgaacacagatctgccatcaggatctgctgtagtttttatgttgtctt

SEQ ID NO: 1607 - DNA, 29364 bp, Homo sapiens
  misc_feature (1)...(29364): n = A,T,C or G, or insertion/deletion polymorphism (see Tables 1-2)
ccttcaatgagaatgttttccatcaataaaaaagttaacccacatcttgtacatagaatacattcactttgaactccatcagtggataggacaaagcaatgtcctttaataaatccaactacttccaagtataaaataaatacaaatttgtaaaaatttttaaaatagagattatacatataaggagatagaagaagtaacatcctgtgaatatatgcagtactttaaccaaatactggtcatcagatatatgatgctcatatggagagctgagaggcttaaagaagagacaacaataatttatgattaaaaattaaggttggctgggtgcggtggckcatgcctgtatcccagcactttaggaggctgaggccagcatatcacgagatcaggagttcgagaccagtttggccaacatagtgaaacccggtatctactaaaaatacaaaaaatcagccgggtgtggtggtgtgcgcctgtaatcccagctactcaggaggctgaggcaggagaatcacttgaacctgggaggcagaggttgcagtgaggcgagatcacaccactgcactccagcctgggcaacagtgccagactccgtctcaaaaaaaaaaaaaaaaaaattaaggwtgacaggtttgccagcctgcttctgagctttctatctccaatagctggtaagtggtaacatagttattattctttgtagacttgctcratcagaattacatttttgtagctcagaagattcacagttcctgtttcgtatcaaatagaaaattctgggtcgtactaaatatttataaactttcatactacataatcgatgttttttagggtacaggatgccaaaaccatttaacctcaaaatcctcttgtctatacatatgtacttaacaatatgcatattgttagcaaatacagatgtgagagaaagatagtattcttgagagaactgcatgccaggaagtgctagcttttaacctttgtgtttttaatcaagtaacagatattgtttaagaaggtatatctgaatatactgtaatgtaaattttcaatgaaataacttcagccctgagacataatgagataccaaagtttaaaaatcccaagtatgtaataaaacaccaaattttaaaatataacttttaacatttccttttacttttctgaagaaacatttaagatgcmctgttataataaggtaaacattgaaactgaatatatttgaattcaaaactacagattttaattactttttacttaaatattttaagcaattaamaatttaaccacagcaccttatcagcatcgtagtatctagtaattctatttttatatcaaagaagtatacatttttgtccatttttgaataattagtaaatcagtagcgtttgcttatattgaataaccttgattgtgaacaatataagcaactctaatggactatttagaaaatsgtaatgttctaattagaaaataccagtatcaacaatgttatttgttgaatgcaaatgataattactttcagcaatcaactaaataccagattgactacaagaaagagaataaaggacaccaactcaccattaaacaacatttactgactctatgacccacccaccacaatgttagcaacagggataatatttatataaaagagagtgggcatgagctatgtgtttcacatctctatgttcctaaggtcagtggatgattcattaaggagtttgtcacctttaygaattctttatgtttaacttaagaaatggatactcattttgtttgggggttgaggtaaaacgggtgggtcaaatagattaccygaaataaacataaactcatattctttttctcccttatccccaaaagtgtgttaaatataattcattgtggagaaaagaaattgttaagtgtgaatcaattttataaaattaactgtaatatggtggtaatgaaagatggtagtctgtaagcagagttctggccactattttgtatatttaaaaggtctatgcaaaagctttgtgatgaataaaggarattaggcttaaaaaaagttaactgcaacaattttaccttcaatttttatgatatggcwccttgcatttgaaaaaggctatagatagtgataactgaaagagtaactgatggtccttttcaccctaagcacagaggaagagttcttctgtatgcttactatttgtagtctgttactatttctgaccctgactcttgaattcattgcctctgctcagaatcactcaagagtttaaattacacttctgctagacattttaaagaacatattatactcattacacattcacagttaaggatggaatccttaacaatgaaggatataaaacaacttttggtataatcaaggatataatacaactcgaaaattgtctatcataatcttcttagctgttaccaattgtatgatgtcatatttacatatgaatgacttcaacacctcaataatctatggatttgtagtactgtgattctcttgaaagccagagcttatgtaatacaaaataataaaattatggattttacaaaataatattctctggctaaatattcttttttttttttttttttgagacagtgtttcactcttgttgcccaggttggagtgcaatggcgcaatctcggctcactgcaacctccacctcctgggttcaagtgattctcctgtctcagcctcccaagtagttgggagtataggtgtgtgtcaccatgcctggctaattttgtattttttttttttttttttttttagtacagatggggtttcaccatgttggtcaggctggtctccaactcctgacctctggtgatccacccacctcggcctcccaaagtgctggaattacaagcgtgagccaccaagcctcgcctctggctttcaaaagagagaatcayaataatacaaaaatttaaacctgttaaaataacactgtccatatcccaacagctcctaaacacgttaactaaaatggcataataaatttgcctgagttcatgtatgccttaataaataatcttcagaaaaaaattttaatcattttatttttctatattaaccatttcatttcccactgttcattatctttttattaatgttattttgctttaaattagtactaacatatttaagtcaatcatttatttaaacaacaacattggctaggtgcagtggcgcatgcctgtaatcccagcattttgggaggccgagggaggcagatcacttaagctcaagagtttgagaccagtctgggtaacacggcgaaacctcctctctacaaaaaaaattagcagggtgtggtggctccctcctgtggacccagctacttgtgaagctgaggcaggaggatcgcttgagcctgggaggcagaggctgcagtgagccgagagcaacccactgcactctagcctgggcaacacagtgagaccctgtctcaaacaaacaaacacagacgcacaacacaccccccacagatattgtttgaaaaatatgtgcaataaactcttattttaagacctttttaaaaaatgctctccaaattgcaaacctagaaaatttaagggatcaaaataaactagacttgaaatcaaaattcaaactggcaaaaaacacttaggctaaaaagtattacaaatttcccctcttagggatacaactagactatgtcaatgtgtttgtaacaatggccaaagttagaattaaggaaaaaaaatcccacaactcaaaaataaataatagtgaaaccaatttctggatgccttctttctagggcatcacattacttcactgggaaccttcaaaggcaacgaatggcacttgcttacctgaggtgttaaatacacacccccccccccccnnnnnnnnnnnnnnnnnnnncacacaacaccgccgccctcctcccgcccccctccccccgccccgccccatcagcttccctgtcctatttctagttttgacagaaagcggagtcccttcacaaacaaggttagctctgtaacaaagcgagcaaagaaaacagcgcamttggcatggcaacttccaacaacttcgaagagaaagcacaactctccaactttgtcgtgctctcattgacacattccccactcacatggaaaatgctgttttaaaaacttccccttttcaatgaactgtcatgctataaaatattacctgttcctatttggaatttaaagaggagctataaaatattccctgctcccatttgcaattatgtgaacataattctcaccataagtttcaccgagatggtagttatgtcacctgcaaagcccttgaagctgcaaaggccaactctgcacacaggaagccatgacgggcacccaaagtccggccaaatggaaagcagcaggcaccccgggagtgtgaggaagggccttctttccatctcatgcagccaaatcctcctccccctacctggggccctcaactctctacctcacgtcctcaaccatcctcctgcgacctcacgcccccaaaccctcctccccccactgcacgccatcaactctcctctgtccacctcacaccctcaaccctcctacccccacacctcatgcccctaaaccctcttccccacacctcatgcccccaaaccctcctccctccacctcacgccccaaccctccctcgtcccactacctctcaccctcaaacctcttccccctacctcacgccctcaaccctcctcccacatcatgctctcaagcccttcccaccaactcacgccctcaacccttctccccaaccctcctcccacacctcatgcccccaaatcctcctcagcccctaaatcctcctccatccacctcacaccctcaaccctcttaccsccacctcacgctcccaaaccatccccaccaactcatgccctcaatcctcccctgcacttcatactcccaaaccctccccaccaactcacgccctcaaccctcgtccctgcacttcaagctcttaactctcccctgcacctcatgctcccaaaccgtccccccacctcacgccctcaaccctcctccccccacctcgcggtccaaaaccctccttcccctcacctcacaccctcaaccctcccccacacctcatgctcccaaatcctcctcccacctcacgtcctcaaccctcctcctacacctcacaccttcaactctcccccacacctcatgctcccaaaccctccccccacctcacgccctcaaccctcctccaaacgcctcacacccccaaatcctccttcgtccatctcacaccctcaaccctcccccctccaccttactcccccaaaccctcctcctcccaccccacgctcccaaaccctccccccacctcacagcctcaaccctcctccccccacctcacgctttcaaacccttcccccacctcacgccctcaacccttcccctcacctcacgccctcaacccttcccctcacctcacgccctcaacccttcccctcacctcacaccctcaacccttcccctcacctcacgccctcaaccctcctccctcccacctcatgctcccaaacccttccctcacctcacgccctcaacctcttctccccacctcatgccctcaattctcctccccccacctcccggcctcaactcttctccccccactcccagccttaactctcctccccacacctcacgcccccaaacttccctccgcctacctcacgcgtccaaaccctcctctctccacctcatgcgcccaaatccgtctcttccctgtctcacacacccctaaatcctcctctctcttccctcccaggcctccaaatcctcgtctccttcaaaccgcctccagagttactccgaattctctctcgccctctaaaactcgctcttttcccttaaaatagctcccctcgataccttaattcccgcgcgaccccggactcctggctcccgtaactcacgagaagaaggggtcatcctcaaaactgctgttcagcatcctgaacrttctggctctgtcttgggtggcggcagccgcggacagattggaaaaacgatgytawctcgccgcggccgcgacaagagctagcctccagtacggacgacgcctcactcgccgcggcgcaggcggtgcccgccgggataggaggtgcgtgacaccgagctgctttcccattggacattgctctgtgacgtcaccaggacgaggcggggagcaatgcgccgctgccctggcaaccgcaatcaacacagtggaggcgagaagtctggccttkcgccggccgggsagcttttcgccaaggctcctgtgggatgggatagctygttctctgggctgcaggaaccaaaacattagaccaccctttctgtgaccttgggcatgccgccctcggttccgagccgcaagtctttctttcggggaaaatgaaaaggggtcaagatttggaccagatgacacccaatgtcccattcaacggtcgcattctgtcatccacaggaattagtcctgtatccgaaacattctctggtagtcaaaagctgtgagcaaataataagaaaaaatgtgcaaaacgttttttagtacagttagcaaatagtgtactcagttgttgaaggaaatgggatgaagcctatcagatttcaacaaacttatttacctcttgagaaagctgctctcttttcggttgtccttctgtgtctctctttcaaagatcaagtctcactgcgatgctgatatgtttttaacacttctccagcatttcttaacctaacagcaggtttcaggcacaggcctgcagcaagcagccatatccaactaaaattccactactatatgtttttatttgcattacatttatcagggagctttctatttatggcaaggaaactgattttaaatttaaatcagtgatatacatcaagagctagattttgcatttttaagtgaaaaagtaagctatcaaatagaacaggtggaatttggatatggtggggcggaggggtaggcagagcaggggagaggaacatcgtgatagtggtactcaaattactaagttttagaaaacactatcacggggcctttcaggagcctggagacagatggaggggaagacagaagagagattaaggagaagaatggtaagagtataagaaaagagaaaatacatcttgcatgtccayccttaattcagtgagctccccagcttctctacgtggctgtcttgcagagataaaggggcgtccatagctcatcagggccccctgggatcaggccagaggggtggcactttgccagcatgaagaagtgtgcaagccctgatttggaggtgacaggagtagtcaggggttattttgagagctggaaatttaatcgtttggatcttttactccccatcccccttttttagccaagttctctggcagcttccttcccctgagactggtggcatggggtagggcagacttcacagcccaagatgagatggcacagcccatccaggaaagaggatattttcttttcctctggactcagaataaagctcagagaacatatacacaaaatttygaaaatttctaaataaatttcaaggcaaacaaaattgttttataagaccttaaattgtttttctctttaaaatagtayaagcacaagatgtgaaggaggccacacttaaaaaaaaacttgaaatggagtaagttatgtgataaaagatggtgttaaaatagttctggattaaggccaagtaaatttgtaatgttaccctctagtttctgtgggaacttttttagaatcacattgttataaaagctttagtccaggcacaggttagtcagggaattagctgaaccttgtgaaagcagtttggatctaatgacaaatgcaaaaaaaaaaaaaaaggagggcagagcagagttggcactgaagagaccttgacatcattttcagaactgatgggtaagaggtggaaatgaaagaaagcgtgggtcaggagagaatgaatactccagcatgggaggaatagagatgcagaacaggactgagaggagagggtcctggacttggctgtaaatataatcataatagctaatatttattgaatgtgtgccaggcactgttgtaggcactccatatgcattacctcattgaatcctcattagcagttttatggagtagagatggcttttatccccatgtatagatgatgcattcaagacacagagaagctgaataaattgccaaggttcacacagctagtaaytgaactgagctgggtacctggagctttcctctgtgagtgctggttatatggtatgtgagtgatgagtcatacttaaagatgcaggatgaaagcgggkaatcatttttcaaaatcatgctgacaagctaaatggacccaaactaaaaagtacaaaattcagtgggaatatattcacatcacataaattcaattctacaaatatttattgagtgactacccagtgttggggactgatctacgaccttaggcatcattgaacaaaacggacaaaaatctctgccttcccggagtttatgttcttgtaaggacagactcaaaataaacaaaatagaaaatagtatattgtaaggtgataagtgttagggagaaaagctgatcagggtaaggagtatggagaggtgcaattataaatagcaagttttgtgtacgcctcactaaggggaatttgagcaaagacccacaggaaggaagtggatgtctagtggaaaagcattccagggcagtgctaaagtagcatttgcctggtgtatataatgtacagtcctactcatatgccttaaaactcaccttctgagtgaggaatgagatgagccaagtaaactgaaaattgcctaatagggtaatagcyctcatttacacttcatatattccaaggattgcactaagtgcttcacatatgttttctcgtttaacctttacagcaaccatgtctaatattatgtttatccctaaattrcattaaaaaaagctgggacccagataaatttgataattgaattttgataattgatttgaaagttgataatttgattaaattttgatgattgaaatttgatgtcactcaattcaaacccagatttgtcttaccccaaagcctgtatcctcaccaccatccgtactttgcctccctattttaaaaattaactatttatggagcaaatatttgcagtaaacacttttacatctataatctgtaactacactgttgcttaggtttcatttggaaggacactgactaaggaaaaacagagaaaaggatgaaacccaagccaactctgcaactctattaaaaacaccaagacttcaatatgtaagtgatttcgtgtttctttcattaatttatcaaatacttattaaggactagtaatatcccagacattattctagacactgaggttacaaaactccctggcctttcggaacttacatcctagtggacaactctttccccagctaattttacaaatactgttacagcacctcagaattttcataatgtttctgaagacattatctcaagtgcccaaaagaaaataaacaggctcttgagtgctgaacttttaacttaattatagctttccagagccgtgaatattaggccattacaaacacctttaccacaattaagctcaatgtgtctagggtttcgttgtcctaatccctttgtcttaaacagtgcacagaggtcctctgagaatgagatgccatagcraactcacaaggggctatgggacaaattttgagagaaacttggcatgtgttagacattgttcaatgtrctagtttagggcagttcacatatttcaatattagattgcactacattgttttagatgatgtcatatcattggaaaggtaggtttctgaaagttactatgatgaaratgaagtacctgtcaatgtggaacaggaaagattggtggcaacattcagtctgtttctaaagtttgaaaaattgtgctgtgctaggcgggcacccatctgttagtatgattatttaagaattatacaaaaatatgtttctttcaatttatgtgcattattttttaaaggtactgagtttttaggtcagaaatacgctgtttgtatctaaattatacaataacggacctattcagtatttctttaaacctagggggcacaatgaaaaaattactgaggaactaagggctcatgaactaagatagtttggggacckctgtctaatcccacaatctttcttcaaattaaaaagaaatgtaaaatatcatgcattccttttctaaaaaatatgtttcattttatttttcatgtttatcttctttacagtcagctgacttaccagtcctctaacagttttgctttatatctttttgaaagatgggaaaatggtgcatascgattaagtgacctgtaagagcatagatcccaaggtcttcaaactcccagtagggctgcctctagtccataatggcatctttgctcaaattagaaaaagtgcctccctctcatgatacttccattaatgagaaatttgtcttaataaatagacaaggctgtaatgtatatgatttgactggtgctcgcttaggtgttgtatacatgtccatggcagcgctgttcctaatcttgaattctttccgctrcataggagttaattgagtgccaagcttcatccccaaactcccaaactcatgtgcaagaaatgtaattttattttcctgcaatcaaccttaatttatcttctgggcttacattccactgggagtcactcccatttcctcttccacggagacaatgccaaggtgtagttggttgctagccatgctgcattcctgaagtcatctttattgccctcactgggtagggccaagggtactaaacatctcactatgtgtggcacggtctggcacaatgaatcgtccttccctaaataccaatagcagtcctctccttttaagaaatacactctctagagcaaatatttcctccagcgaagtaaaaatttaacgaakaattgagttaacaaaggaaaaaagtggcagacttttaaagttatatttacttttacagcttttatctgtagatgtgtatgcctatgamtagtggtttattttgcacaaattataattgaggcatattttattttgaaaactgttgagtaaataccacttttggggggttggtaacaagagattggctttagtgaaaagatactagaggcaagaagctggggctctgggccctggacttgggtcctagaattcaggtggtagtgagggagtatgtaagaattcaggtggtagtgagggtgtatgtaagcagaggaatgttctgtttcagtgatggatgggcagagtgggtgaggatgacagaaaaatctggagaggaaatcaagatccgctattgggtcagggctgagccaaagattatagtgtttaataagcataagcaaaagttttggcctttccctcatttctttgatgtacatctttgaggcttggttacttagggatgtatttcataatcttttaaaaataatcctttactttctttttttgttttgttttttttggggtggagtctcactgtgtcacctaggctggagtgcagtggcgcgatctcggctcactgcaagctccgcctcccgggttccctgcctcagcctcccgagtagctgggactacaggcgcccgccaccgtgcccgcctaactttttttgtattttttggtagagacggggtttcatcgtgttagccaggatggtctcgatctcctgacctcgtgatccgcccgccttggcctcccaaagtgctgggattacaggcgtgagccaccgcgcccggcctaatcctttactttctaccataaagacacatacacatgtatgttcattgcagcactatttacagtagcaaaaacatggamtcagcctaaatacccataaatgatggactagataaagaaaatttggtacatatacacaatggaatactacacagccataaaaaagaatgagrtgacgtcctttgcagcaacatgaatccagctggaggtcattatcctaaggtgattaatgtaggaagagaaaatcaaatactgcatgttctcacttataagtgggagctaaacatgaaataaacgtggacacaagagaacaatagacactggggcccacttgaggtgggaaggtggaaggagggtgagtacctactggatactatgcttattacctgggagataaaataatttgtacaacaaacccctgtgacacacaatttatccatgtaacaaacatgtaccccacgaacataaaagttgaaaagaataaatgaaataaaataatgatttagataagtgctaatttctattcagtaatagttcctgtttaaaaagtatctactgggctgagcgcggtggctcatgcctatagtcccagcactttgggaggccgagttgggcggatcacaaggtcaggagttcgagactagcctggccaacaatagggtgaaacyccgtctctactaaaaatacaaaaattagccgagtatggtggcgcatgcctgtagtcccagctacttgggaggctgagggagaagaatcgcttgaacccgggtggcrgaggttgcagtgagccgagatcatgacactgccctccagcctgggcgacagagcaagactccatcgcaaaaaaaaaaaaaaaaaaaaaaaaaccaagagaaacaaagtatctaccaagagttttgtaaacttttatcccaactaattctctcaataatgctatgagggagkcattatttacattttgtgtgtgcgaacacagaggttcaggtaggggaaatgatttttagyttgcaaggttcaactataaatggtcttctagctggtgagtggtttaatgtgaattctgatccagacctgaccgttttgaaggccgttcccttctcrctgcacccatagccaactctcatgataacgaaaaaggacttgatggtgtggaattacataaatgtaaagcttctgggagtatccaaacttaggttgtttggtttaagtacataaagaagtttttcaattttyctgaaaaacaaaacaaacaacactgaaactatcattcaatgaataaaataaaggctcttactctaaagacaaataatttgaatggcaatgtcaaatacaaatatwccaattttttttggtgacaaaactccaactttccacacagcccgtaatggattcatgtgcagttgatgaatgaaagtccacatccaaagcttgcttagtctttacaatttacgttttaaattgaggtataacttaaacatggtaaagtctactaaacttcaatgtatagctcaatagctttttacatatgtgcaaacctatgtaaacaacacccagttgaagatataaagcatttccaatactcaagaaaattcccttgtgtccctttcccatccatgtccctctagggtaaccactattctgagatttgtttctttcacttaacattatgtctgcaaaattcatccttgtcattgctgtcattgcatgtagcagcagtttattctttttctttgttgtattctagcatatgaatttgccacaagtaatttacccatctactgttgatggattttttgattgttcttttttttggcttaaaaaataaggcactatgatcatgcttgtgtttttcctgattaagttttaaaaatcaacttacattcagctattcttgaatctttattgtcattgaaattctgaaactttttttctacagacaataattttataagaaagatttttctattgagtcaacaccttgatagttgctactgtcttagaaacacttcttttaaaaaataaaaaatcttagaattacagagcctaaaacaagttgaatagtagaaagcactcttcagaaaatactgttgaggtcatctgttctcaggaacactttaatgtggctatctagagtgttatttttaaatccttgataagatttgaagagagttcacactgtagtttggaggccccactgccaaggcaatcaaytgaagtctgtccagaggacaagtaaattattttggaaaacattaaggacctggaataccttcatctctttgtcatatgcttagatgtctttactatttgaaatggtaggaataatcacagaagaattgtttttaatttcaagaagctagaaaggacacaatagtcattataaggccatgtaagttttaatgccatttgtgatatatattctggggtaacaaggtaaaggggagctagggaattgagaatgagtggctccaacctatacctgatttcctcccaattcatatctcccaaagacctagaaattcccctgggaaacagcctccaggaaggctcacactgctgaatggcactggcagcctgttgggagaaataagacagccaaggccagaggttgtcgggcggggtcggggtgggggcggggcggggtggagaatgttggggtctgctgtaggttgttaataataaaagctaaaacctatgtactaggcacattaattcacatgttttttttttcttcaactcctactttaagttccagggtacatgtgcaggatgtgcaggtttgttaaataggtaaacgtgtgccatggtggtctgctgcacaaatcaacccaccacctaggtattaagcccagcatccactagctattcttcctgatgctctccctcccctcctcccagtgtgtgttgttgcccccaacgtgtccatgtgttcttatcgttcagctcccacttataagtgagaacatgtgttgtctgttttcctgttcctgcaattcacaacagttttattactattttacataagcgaacacaggttttagagaattaactaatttgcaaaaggcagtattgctggaaagtggaagaactgggattggaactcacgctgtctgactgtagaatctgggctcttaatcactgagtatwacctcagctggccccactcactgcctaacacacaggagactagctgtcttctttacctccagttgagggtagggctttacctagagttggagtcaaaaacacgaacaccaatagggatcagacaagtaaaaatgtgaggcaagtgaactaggtaagatgataaggagaataagaattaataataataataatgccaggcacagtggatcacacctataatcccagcactttgggaggccgaggtgggcagatcacctgaggttgggagtttgagaccagcgtgaccaaaatggagaaaccccgtctctactgaagattaaaaaacaaacaaacaaamaamaaamamaaacaamaaaaaaaacaactagctggacatggtggtgcatgcctgtaatcccagctacttgggagactgaggcaggagaattgcttgaacccgggaggtggaggttgcagtgagccgagatcataccattgcactccagcctgggcaacaagagcgaaactccatctcaaacaaacagacaaacaaacaaacaaacaaaaaaagagttaataataataataataatawctaacatttgttgagtttctactgtgtgccaagcactgctctaagtgctttacaaattttaactcccttaatcccccaggtgatctaatgagataaacactataagtatgcccattgtgtataagaggatgatacaggtcagagaagaaaaactgcttgctcaaggtcacacagccagaggaccctagctcttatcactgtgctgtatattcacaggaacctggcatggtgggcacagtcgggcactgcaggcggcttgcctccagcagaaggaatactgctactcagctctagatgattgccctgaagaaattcatgcccactggtaatatggaattgtatatgaaatctaattttttaaagttaacaactaattaaaaagaaaatagcaggccaaacaaatctttcggtgaacctggcccataggctgcaagcctatgatctagttagagtgagttttcatggcatgaaagagacacatgatcctggtaacattcacatactgccttttgagtgtaactcaaaactatgttgatggcaggtcttgtgttgtgagagctgagaagcaaagtgccctgactcctagcagtaggcctttgtgagtggacaccagttaccaaccatatcagtgaagggtcatattttaaaattccagggccatgagacagttgttttatttctgcaggatatttagattacagattaattttttcatttggaccacaaaaggttagcacagctttatcaggttctgtgtattatattactgttttaattctctttagtcagtcttaaaatagattgacatcattttggtctctgctttaaagtgcctgcctttcaatttcttatttatgaagacatccctccctgtatagctttgcaaaattagactctaataatgyatataataaaatatcaaaagcccatatttccatataaaaacaatctattaaactaaaggtgactgactgcttccaaaactttttctcataatattagtcatttgtttacttgtcacttgttttgtcacctattgtagagtcataggtgttaaacaaaaaacttggtaatatttttaggagagtctttcttttaccttattttctcctcttcaaacctttatatttatattgaatatgtactctaggttctcaggaaaaaaaatgtttaagcattttattagtctcttagggctgccttaatagagtaccacaacctggtggcttaaaacaacacaaatttattctttcacagttctgaaggttaaaagtctgaaatcaagctgttgcagggctatgcttcctctggaagctctagggaggaatccttccttgcctcttcctagcttctcatggttgctgatacttggcttgccttgtattactccaatctcttcctcagtcattacgtggccttctcccctgtgtgtctctgagtccagttctccttctccttataaagacaccagtcactggatttaggacccactctgatacactatgacctcatcttaagttgattatatctgcaaagacattattcccaaataaggtcacattcacatttttcatgtggatgtgcattttaagggagggtactatttaacccagtatgagtatctattagtaacttgtacaaaaataatcagaatagctacagaacaaaattatcagtgttaattgttatgtaagacttgaaatatgacccaacaatcagctggcaaacttgaaagcatatgactttacaaaattttacagtatgcattgtggagattaacctcattccttctaacttcttacctatttgtattagtctgttttcacactgctataaagatyctacctgagactgggtaatttagaaaggaaagaggcttaattgactcagttctgcatgactggggagatctcgggaaacttataatcatggtggaaggcaaaggggaagcgaggcatgtattacatggtggcaggcgagagagagaggaggggaaagtgccagagacttatcaaacaaccagatcttgagagaactcactcattatcacgagaacagcatgggggaaaccaccctcatgatccagtcatcagttccacagatctttagggcaggggcaaaatgccaccactttctttgctaaagcatagcaagaatgacttttactccagttcccaataagttcctcatgtccatctgagaccacttcagcctagacttcattgtccatatcacaatcagcattttggtcaaagccattcaacaagtctctaggaagctccaaactttccctcatcttcctgtcttcttctgagccctctaaactgctccaacctctgccagttaccagttccaaagttgtttccacattcttggatatctcataagaatgccccactacctcggtaccaatgttctgtattagtctgttttcacactgctataaagatactacctgaggtctcaggaaacttacaatcatggtggaaggccaaggggaagcagggtatgtcttacatggtggtgggtgagagagagagagaagggggaagcaccagacacttatcaaacaaccagatcttgtgagaactcactcatgagaacagcatgggggaatctccccccacgatccaatcaccttccatcaggtccctccctcgacatgtgaggattacaactcggattacaactggaggtgagatttgggtggggacacagccaaaccctatcactattctactttcattctttcttttgtcccattttctccattggcttgctgaaatttctgttttatctggtgatattctatgaatttcgataaaatacctggagcttttctgaaacaaagattggtaggaataaataaataaaataattaaataaccgctgttaattttatggtaatgttgagatattggcctccttttgagagcaaatttactatgagatgcttgctaacatgataaagtgccagtgtagatctcaaagtgaaggctgtaattgcccagaccttttcacattaggtatctgcatgagttataactcttctgtgaagataaaaaggcttctgcaaattgccccagtgctgtaaggactgtcagacaggagggcatctcaaatgagattaatgatgtttgccttaatataagaaaatttagcataaccaagattaaagattctgcagaaacctgtcagcagtcatttattttgaataaatattatttttaattaaagtcctaaggtaggttattcctgaaataatgagatctacaatgatttcctttgggaattaatgttctttattaattttcagtcattctgatgatcacagctcattcaatattactcatggcagtcagcttggtaggacatgccaatttccagctaaaggcatgaataaccctgtatttgtttttcatggcactctcattttctaattatatttgtcattgaacccraacacttttataggtatgtccatccatagcaatatatagtgactatgattcataaaataaggaaatcactcacaaaataaagcttcataaaataaagggaacataaaatcagaaaattatagtattgtyatttttaactatttaaaaaattggttctgcttctttgctaggcattgtgctaagtgttttatgcacatcaactctaatccacatgagaactctgcatgacagaaattgctattcctgtttactagatcatgacatggaagttcaggaggtagcttgccaaaatttagctctatacctcatgttcatagcatgtacatagcatttatatgaacatcagtatttatcagtatgtggttcaaccagattttcaaggactcaacagagttggtgtttttgttactgttgtgtgtaacaaactacccccacaactttgtggtataaaagagccattttattatgctcacagattctatgggttagaaatctagccagggaaatgaagacggcttatctctagagcctcagctgggaagactctatggctagaggggttttcactcacatgtctggtggttgattctggttattggttggaaattcagttgggactgttagctagaacactaaaatccacactgtctatagtgcatgggttttctcagaatgtagcagcgtcagagtagttggtgatcttacatgaaagctcagggctccaggagtgagcatctatattagtccattttcacactgctggtaaaaacatacccaagactgggtaatttataataaaagagakttaattgactcacagttctctccatggctggggaggtctcacaatcatgacagaaggcaagaaggaacaactcacaacttacgtggtagcagggaagacagagagcgtgcrcagggaaactcccctttttaaaaccatcagatcttgtgagacttattcactttcacaagaacagcacaggaaagacccgccctcatgattcaattactcccactgggtcccttccatgacatatgggaattgtgggagctacaattgaagatgagatttgggtggggacacagccaaaccatatcattctgctctgaccctcccaaatctcatgtccttacatttcaaacccaatcatgccttcccaacagtctcccaaagtcttaactcatttcagcattaactcaaaagtccacagtctagcattaactccaaagtccacagtccaaagtctcatctgagacaagggaagtcccttccacctatgagcctgtaaagtaaaaaacaagttagttacttcctagatacaatggggtacaggcattgggtaaatacagccattccaawtgggagaaattggccaaaacaaaggggctaaaggtcccatgcacgtccaaaatctagcagggcagtccaatcttaaagctccaaaataatctcctttgactccatgtcttgcatctaggttacactgatgccagagatgggtttccatggcctggggcagcttcacccctgtgactttgcaggatacagctccctcctggctgctttcatgggctgagtgtttgcttttccrggtgcacagtgcaagctgtcattggatctaccattctggggaatggaggatggtggccctcttctcaaagctccactaggcagtgccccaatggggactctgtgtgggggctcacaccccacatttcccttctgcattgccctagcagtggttctccatgagggccccactcctgcagcaaacttttgcctgggcatccaggcatttctatacattttctgaaatctaggtggaggttcccaaaccttaattcttgacttctgtgcacccacaggtccaacaccacatggaagctgccaaggcttggggcttgcacccactgaagccacagrtcgaactgtaccttggcccgttttagctacaactggagtggcttgatgcagggtatcaagtccctaggctgcacagagcagggggggccctgggccccacccacgaaagcatttttttcctcctaggcctctgggcctgtaatgggaggggctgctgcaaaggtctctgacatgccctggagacatctcccccattgtcttggtgattaacatttggcttcttgttacttatgcagatttctgcagctggcttgaatttcccctcagaaaacggggttttcttttctatcacattatcaggctgcacattttctgaattttttttgctgttccccttttaaaactgaatgcttttaacagcacccaaatcacatcttgaatgctttgctgttagaaatttcttctgccagatgccctaaatcatctccctcaagttcaaagttccacaaatctctagggcaggggcaaaatgccgccagtctctttggtaaaacataacargagtcacctttacttcagttcctaacaagttcctcatctccatctgagaccacctcagcctggatttcattgtccatatcattatcagcattttggtcaaaagcattcaacaagtctcaggaagttccaaactttcccatatcttcctgtcttctgagccctccgaactgttccaacctctgcctgttacccagttccaaagtcacttccacattttcgggtatctttacagcactgccccactctactggtaccaatttactatatgcctctgttttcacacagccaaaccatgtcagcatcccaagaaaattaggcacaaacctttactgaactagctttggaaattatgctgtgtcccttcggatgtattctgttggctatgaccaagttactaagattgacacagagtcatgtaagggacrtagatcttcacctctcaatgggagaagcatcaaaaagtttgcagacatgttttataacaccattacagagagtatcaactctattatatattgtcacttcttggtgcagggttcttatctagttcccttttttttggatccactttctgtccagctgcttcctgatgacctatttgattcccaggaaaataagaagcaaggagaagctccaggcaaatgcacctctattaccagctggagcttctgccactaatttctagctggtcttctgccttgataagttggccagagaagaatagaagcatcggcagacccttttcaaccttttctccggaggacagagggagccagactataccttttgtttcccatagaccatttctcttggctcttcaggaccaagtgcaggctgaaaaaattcatatttattgcttcactcataggagttcatgcacctggtatcygatcctttgtaaattaaaagatttgttgataggaagcgtctgctgatggagactgaaatcatggatcaaagaatggttggtaaatatagaattagagtagaattagccatttccatgtgcttagaatataagatgaatgaaaggctttttttttttctttaaagaaggaaatgtttagttgagtaaagacacagaaactaattaaattggcaaggaggtgattaggcaccagaattaaattgatgatttggtgtctcctttcccttgagcccactccttaagagatcataccattatgacataaagtcaagctgaaacattcatgccagatccctctaaaagggatacattcagtttcagagaggtactcttaactgactagcattggcttggaatagagagctgaggagcaatgataattaggaattctcagggactgtatgtactcattcacttcatgtttgaaatgtttctacataaagctattcttgctattacaatataactttgtgaaaagagtgcttgtctactagccttaggagaggtaggaaaggaattatgccatctagcagtattccatgagttaatggaaatttggattggtagatgtgctatgtggccaggttctttttcaggatttaaatattttctaaagcttcataattatcaaggtattttctgctatggatgaactgaaatactacctttccaaatatctcttgcaacaggagagcagtcagttgactcagttgtagccaatgaggtataaattttaatatatatatactcttttaatttcagaatctccttaaagggaggcagtgcattcttcatggctagagcttcagcagctatctagaaccatatggtggaagccacttactgagaactgtgaaacaagagcctgggtccctgacatatgaagccaccatacctaccttmaagtgtctttcacttgagggaaaaatacatctttcttaggtaagccactgttcatcgtttctgttgtgttatcagaacgaatcgatatacttaattaatcctaaatgatacaatgcctttgaagataatcttatcagctttggtcccagcaggaaaagatgacatactcaaaaccttaatgaagtcattatatacagagatgtgggcagggttaaaggaaccaatttgggagtagtagctacaagaaacaatttcagcacctaggtctgaagaggtataaggagggagctgttgatttaacatggtgagagctgtatccttgagagagagactagcctacaaaggtcagaagagcagccacaccggcccagcacggtggctcatgcctataatcccagcactttgggaggctgaggcaggcggatcatttgaggtcagaagattgagaccagcctggccaatatggtgaaaccccatctctacnnnnnnnnnnnnnnnnnnnnnnnnnnnnnnnnnnnnnnnnnnnnnnnnnnnnnnnnnnnnnnnnnnnnnnnnnnnnnnnnnnnnnnnnnnnnnnnnnnnnnnnnnnnnnnnnnnnnnnnnnnnnnnnnnnnnnnnnnnnnnnnnnnnnnnnnnnnnnnnnnnnnnnnnnnnnnnnnnnnnnnnnnnnnnnnnnnnnnnnnnnnnnnnnnnnnnnnnnnnnnnnnnnnnnnnnnnnnnnnnnnnnnnnnnnnnnnnnnnnnnnnnnnnnnnnnnnnnnnnnnnnnnnnnnnnnnnnnnnnnnnnnnnnnnnnnnnnnnnnnnnnnnnnnnnnnnnnnnnnnnnnnnnnnnnnnnnnnnnnnnnnnnnnnnnnnnnnnnnnnnnnnnnnnnnnnnnnnnnnnnnnnnnnnnnnnnnnnnnnnnnnnnnnnnnnnnnnnnnnnnnnnnnnnnnnnnnnnnnnnnnnnnnnnnnnnnnnnnnnnnnnnnnnnnnnnnnnnnnnnnnnnnnnnnnnnnnaaacgatcctcctgcctcagcctcccgagtagctgggattagaggctaatttttgtatttttagtagagacaggttttcgccatgttgaccaggctggtctcgaactcctgacctcaggtgatctgcctgccttggcctcccaaagcactaggattacaggcgtgagccaccacacccagctgactttttagtttttaagtggcttgaaggagactaatataatcttaatttgcatgaaatcatataatttggaagtttattgctgctgttcattgattgtttactagtttagatgtgaaaggtacataccctatggctcagcaattccacttttaggaatctatgcagccactaaaaaraatgaggcatatagctatactgctttggaaagttatccaatgtatataaccagggaaaaaagttaactggggaccagtatgtttctcatggtcctcagtatgttgttatggtctgaaaagcaagcccatgtgtaaatatctctatacagatgtatttgtttaggcacagggcaaagttgagatgaactgttcagaatggtcacctggtcaggagaaaaaaaagcagcagcagaataggaggggcagactttctttacattccacagttcgttgcctatggatgactttcctttcctttyatgttttttagcattttccaataaaaaaacccaatcataaaaatatggaatatctcacttaagaaaaagcttaaatcgggatataattttcattttgtgtatccttttatcaggctgtttcctctatatgagtttagcaaatccgcagatttactaaatcatatgtggccatttagtagcttggatacttacattatataatttacagaaaaaatataaatattgagaaaattttttagtacttagcagaaagataattactttagtaaaatgttggtcaatcatatttaatttacaaattccatattaaaactggaatccaatatttaaatcccaattgaagacatttaaacattagatttaaaaaaaattcccaaagtaaaaatacatttcaaatctatgttgcctttgttagtaaaagaacagaaatttttgccacagatcatggtaattccaaaatagttatttcaaaaaataagagaagcagcatatatttttataatccttactttcaaagatctccaagttctgtgtaaatatctttccaaggaagtaagaaattaattgaacaattctctggataattacattgcagttattatagtaaggtaaaaatacttaaaaattggaacttcaagttaaagacctccaaaagaaacagagtctctggcattctctaggctatggtgaaccataacctgttatcaatcacttgtcaccttctcatattgttaattataaataagatacattaaaattctgagcacgttgctgaaaatgggtcacatgacctttgaaacacaagtatgattatgggataacaagtattaatgtgaaaataaaattttttttaaaggttcaagtgtttttgatggagtagctattacgtaatacagggcttgagctactacttatgctctatgataggcatatacaaatttttgttttttggccaggcgtagtggctcatgcctgtaatcccagcactttgggaggctgaggcgggcagatcgcgaggtcaggagatcgagaccatcctggctaacacggtgaaaccccgtytctattaaaaatacaaaaaaaaaaaaaaattagccrggcgtggtggcaggcacctgtagtcccagctactcgggaggctgaggcaggagaatggtgtcagcccaggaggtggagcttgcagtgagctgagatcaggccactgcactccagcctgggcaacagagcgagactccatctcaaaaaaaaaaaaaaaaacaaacaaaaatttgttttttawaaaaacatttcaagtatgaaatgaaatatcagacattataattttggatgatcttccattttcacctcatgtaattagactgcagatgattcaagtttacagcattttgagaaaaagcatttttttcaagttgctaataaatcagtcatctgccttatcttctccagatcaattagacttactatagcagaaaaagcgaagagaaaagctataatatggctacataaacaatctagttatagaatttgtttaaaaaatctacccaatctttaatatagtcattcaatccattgtgctattttaaaaaagatttttcaattacttatgattttcaattcaagtttataacacaattttcatagaacatttacagaatcacagactgcagctatggattttactcaagacgtgggattttagcagttcattttcatttatttattgtttagagagagggtcttgctctgtcacccaggctggagggcagtggygtaatcacagttcattgcagccttgaattcctaggctgaaacaatcctcctgcctcagcctccaaagtaggtggtactacagccatgcaccattgcaccttgttcattttctttttattttttggagatgaggtctcgctgagaggtgaagccagctggacttcttgggtcgagcggggacttggagaacttttctgtgtctagctagaggattgtaaacgcaccaatcagtgctctgtgtctagctaaaagatcataaatgcaccaatcagcactctgtaaaaacgcaccaatcagtgctctgtgtctagctaaaggattgtaaatgcaccaatcagccctctgtaaaatggaccaaccagcgctctgtaaaatggaccaatcagcaggatgtgggtgaggccaaataagggaataaaagctggccatccgagccagcagcggcaaccctctcgggtccccttccatgctgtggaagctttgttcttttgctcttcacaataaatcttgctgctgctcattctttgggtccgcactacctttaagagctgtaacacttgctgtgaaggtctgtggtttcactcctgaagtcagcgagaccatgaacccacyggaaggaagaaactccggacacatcagaacatctgaaggacaaactctggacacaccatctttaagagctgtaacactcaccgcgagggtctgcggcttcgttattgaagtcagcgagaccaagaacccaccagaaggaataaattccggacacattgctatgttgcccagactggtctggaactcctggcctcaagcaaacctcctgcctcagcctttcaaagtgctgggattacaggtgtgagttaccatgctaggcctagttcatatatatatatatatatatatatatatatataattttttttttttttttgagacagagtcttgctctgttgcccaggctgaagtggcatgatcttggctcactgcaacctccgcctctcrggttcaagcaattctcctgtctcagcctcccaagtagctgggattacaggcacctgccaccatgcccagctaatttttgtaattttagtagagacgsggtttcaccrtattggtcaggctggtctcgaactcctgacctcaggtgatccgcctgccttggcctcccaaagtgttgggattacaggcgtgagctaccgtgcccggcacctagctaatattttaaaagataaaaagggagcctgaactatgctatgttttttacactgtgagataacaagcctgaacaacaatacaagatctaaggagagagggtcagttcagttcatcactctttcagaactgcactgggatcattttgccattccttctcaagacctaaaaataaaacgattacattgttgattttaaagtgttgtcttactctattcgtagtctttatttcttgaaagctgacctatagctttggaaggagagatgataggtgccagctggtggacccagaatgattacatcaatacattttgaaatatttatacaaagaaagagtcagactagaaaattctgggcaagagtaggactaataagatccctacttaaattctagtcccaccatttagttcctaatgcaacagagaaggcaccacgtacagtgtacttccctgacatccgaaagcctctgtcagctcagggccatttggagatatagatcagagaaaccaaaataatttggttataacatttatttttgcactggctccaaatagcttgagcaatgtaaataaacaggctgctaaatagatttcttatttaagatgggctaattaattcttcattaaaacatatttattgagaccttctgtatgtcaggcattaggccagattctggagaaacaatgatagccaaaataacttggaaatatatcatgayagcattttcttttagaaaaaactcaccaaatagagttgaatatattaatcaatgtccatccctatgataaaaggttaagatrattacagaatttacagtgttctttcttatatccatttgtattcctgctgtgctctactgactcaaatgttttcttatgaagagtacttacttttccattattctataaaggagttccaaagagtaaggcttacaggaggacattaaaaaattgtgcaaataatccaagcattttatcagttgagtaatggccaagagtttatttaaaatctcttgtaatactcacaaggaattttggggtagggaaaggaggaaagcaaagagtaacatgggtgcaagcctttgatataaactcatctagagtttagtggctgaaaatgtcctatgtcttatttcatttctagtttttttttactatcttatttgcttaaagattttcacttgatgcacaaatcaaaggaaaatctggggagggacctaaccacaggcaaatgaattgtgtcttttagttcccaaatgatgctttctataacagtacagagtagaaaaacagagagtaatggaacacacagtggtctacatggttgtgcaaacccttactggcagatgcagttcttttttagcggcattgaaagtctcttttcagctccattgcagaatctgtcgtctt

SEQ ID NO: 1608 - DNA, 149546 bp, Homo sapiens
ataaaatgtggactgtgctgggatggtatatgctaatacaaagccttgtccattttttatgtacaaaccctttattgctgtaaattgttctgttcctgcagtatccaatatgtcaagcatacagagttgtgcatctatttccacttgctttctgtaatatcttttattgtaggaccatgtttttcaacaaaattctttgtacaaattgtacagtcaaagcagaatttccaacagctcctgagccaagaatgactaatttatactcaagcatgatacaaattttttaaaacctagtacctctcatgctgtcaccaggtcactgcagtcagtgttgctctgtgctttctctgagttgctactcctggtgctatggtggtcttgcctctgctactgccactctggctggtttatatgcctgaataatgagttttaaaatcatatttgcacgtgtcatggtaacttcacattaaaaaacatacaatgaatgcacaaaaaaaaaagcaagaaactaaatcatatcaccagagaaaataatcttcactagaggaagacaagaatgaaagaaagaagaccaaaaaacaatatgaaaagaacaaaatgacaggtgtaagtccttacttgtccataataaccttaaatgtcaatgggctaaactctccaatcaaaagacatagactggctgaatggatgaaaaaaaaaacagttgatcttctgcctacaagaaacacacttcacctataaagatacacagagatggaaaataaaggattgtaaaaaaatattccatgccaagagcaggagtagctatacttacatcagacaaaatagaattcaagacaaaagcaataagaagagaagtaggtcactatgtaatgataaggggggttggctcagcaagaggatacaacaattttaaatatatattcacccaacactggagcacccacatatataaaagaaatattattagagctaaggagagagagagactctaacacaataatagctggagacttccacacctcactttcagcattggacagatcattcagacagaaaatcaacaaagaaacatcagacttaatctgcaatatagatsaaatggatctaatagatatttacagaacatttcatccaagggctgcagaatacacttttttttttttttttttttttttttgagacagagtctcagctcactgcaagctccgcctcccgggttcacaccattctcctgcctcagcctcccgagtagctgggactacagtcacccaccaccatgtccagctaagtttttgtatttttagtagagacggggtttyaccatgttagccgggatggtctcgatctcctgacctcgtgatccacccrcctcaggctcccaaagtgctgggattacaggcatgagccaccrcacccagccagaatacacattattttcctcagcacatgaatcrttcttaaggataggccagatgttaggtcacaaaacgaaccttaaaacattaaaaaaactgagataatatcaagcatcttctctgacaaaaataaaactagaaattaataacaagagaaattttggaaactattcaaatacatagaatttaaacaatatgctcctgaacgatcagtgagccaatgaagaaattaagaaggaaattgaaaaatttcttgaaacaaatgataatgaaaacacaatataccaaaatctatgggatacagcaaaagcaatagtaagatagaattttatagctctaagtatctacatcaaaaaaaaaggaaaaacttcaaatgacaatctaatgatgcattttaaagaactagaaaagcaagagcaaaccaaacccagaattagtagaagaaaagaaataataaagatcagagcaggacaaaatggaaaaaacaaaaaaaaagaaacaaagttttatttttttgaaaagttaaacaaaatggacaaacctttagccagtttaagaaaaaaagaaagaagatcaaaataaataaaatcagaaatgaaaaaggagacattacaactgatatctgcrgtattcaaaggatcattagtggctactctgagcaactatatgctaataaatggaaacatatagaagcaatggacaagttcctagatacatataacctgccaaaattgaaccaggaagaaatccaaaacctgagcagaccaataacaagtaatgagattgaagctgtaataaaagtctcccagtaaagaaaagcctgagacctaatagcttcactgctgaattctagcaaayatttaaagaaaaactaatacgaatcctactcaacttattctgaaaaacagagaaggaggsaatacttccaaactcattctatgaggccagtacttccctgatactgaaaccagataaagacacaccaaaaaagaaaactacaggccaatctttgatacatattgatgcaaaagtccacaactaaatactagcaaattgaattcaacaatacattagaaagatcattcatcatgaccaagtgggatttatccctgggatggaaggatgattcaacatatacaaatcaatcagtgtgctacatcatatcaaaagaatgaaggatcaaaagcatatgatcattttaattgatgctgaaaaagcatttggtaaaattcaacatccttttatgataaaaaccctaaaaaaaaaaactggggatagaaggaacatacctgaacataataaaagccatatataacctacccacagctagtattrtactgaatggggaaaaactgaaagcctttcctctaaggtctggaacatgacaaagatgcccacttcaccacygttattcaacacagtactggacatcccagctagagcaatcagacaagagaaagatattaagggcatccaaattgtaaaggaggaagtcaaatyatccttgtttgcagatgacatatctcacatgctgagaaacctggagactccacaggaaaactagcagaactgataaacaaatttagtaattcagtagtagcatttctgtatgtcaagagtgaacaatctgaaaaagaaatcaagaaagtaattccatttacaatagctacaaataaaattaagtatctaggaattaaccaaagaagtgaaagatctctgtaatgaaaactataaaacactgattaaagacattgattaggacacacaaaaaatggaaaaacattccatgttcattaattggaaaagtcaatattgttaaaatgtccatactccccaaagcaatctacagattcaatgcaatccctataaaaataccaatgacaytcttcacagaaatagaaaaaaacaatcctaagatttatattgaaccacaagagaccaagaatagccaaagctatcctaagcaaaagaacaaaactggaggaattacattacctgacttcaaattatactacagagctatagtaaccaraacagcatgctactggcataaaaatagacacacagatcagtgaaacagactagggaatccagaaagaaatccacacacctacagtaaactcatttttgacaaagatgccaagaacatacactggggaaaagacagtctcttcaataaatggtgtggggaaaactggatatacatatataaaggaataaaactagacccctatctctctccatatacaaaattcaaatcaaaatggactaaagacttaaatctaagacctcaaaccatgaaactactacaaaaaacattggggaaatctccaggacattggttggggtaaaaatttcttgagcaatacccaacaagcacaggcaaccaaagcaaaaatggacaaacgagatcacatcaagttaaaaatcttctttacagcaaaggatacaattaacaaagttaagagaaaacccacagaatgggagaaaatatttgcaaactacccatcagacaagggattaataaccagaataaataaaaagctcaaacaactctatagraaaaaaatcaaataatccaatcaaaggatgggcaaaagatttgaatagacatttctcaaaagacatacgaatgacaaacaggcatatgaaaaggtgtttaacatcattaatcatcagaaaaatgcaaatcaaaactacaatgggatatcatcttacccagttaaaatggcttatgtccaaaagacaggctataacaaatgctggtggcaatgtggagaaaaggaaacccttgtatatttttgatgagaatgtaaatcaatacaaccactatggagaacagtttggaagttcctcaaaaaactaaaaattgagctaccatatgatctagaattctactgctgggtatatgcctaaaagaaagaaaatcagtatatcaaagaaatatctgcatgtgaatgtttattgcagcactgtttacaatagctaagatttggaagcaacctaagtatgcatcaacagatgaatgggtaaagaaaatgtggtacatatacacaatggagaactattcagccatattcagtcacgtccaacaacatggatggaactggagattattacgttaagtgaattgagctaggcacagaaaggcaagcattgcatgttttcacttatttatgggatytagaaatyaaaacaattgaattcatggacaaagagagtataaggatggttgccagaggctgggaagggtggtggtgggtggggtggggkatgggagatggggacagttaatgggtacaaaaaatgtagaaagaataaataagacctactrtttgatagcacaacagggtgactacagtcaataataactgtacatattaaaatgacttagarcatacttggattgtttgcaactcagtggataaatrcttgaggggatggacaccccattcttcatgatgtgctcatttcacatggcatgtctgtttcaaaacatctcctgtaccccataaatacatacacctactatgtacccacaaaaattaaaaaacaaacaaacmaaaatccaatcaaaagacgttcagctcaaaacaaaacctcatgcatgtgttactcatagggagaaccttatatcattaagaaaaggttaagttacatttagtataatttatttaagaaaacaaggaggttggcctgttgtaccgcggtggctcacgcctgtaatcctagcacttttggaggccgaggtgggcggatcacgaggtcaagagatcgagaccactctgggcaacatggtgaaaccccatctctactaaaaatacaaaaattagctgggcatggtggcgggcgyctgtagtctcagctactcgggaggctgaggcaggagaatcgcttgaacctgggaggcggaggttgcagtgagctgggatcatgccactgcactgtagcctgggcgacagacagaaattcagtctcaaagaaagagagagagagagagagaggaaggaaggcaggcaggaaggaagcttgtacaatgtttccttctcaaagcagacacttgaacatatcttaggtttctggtaactagtttcagctgtctcgatagacctgataagtcagtattttagttaatatgtagtaaagttctgagagtactctaaccaacttccttgtttttaactctctcccagggtatttgtctattaatttcagctttgtttgctcttaaatttaaaaatatgtatttggcttctgagttctgttttctctctcagttgcattgcttgatttgggtgcctctatttttccaataattctttattataatagtgctactgtttgctaaagcatacgtggtcaaaacccaattccctgcagagctgaaaagagctcagagaagtaaggtggtggacgacccactgaaatgttccagtttcagactgcatgtgtcacacccttgctgaaatacaattcgttttctttaatttccatgtgaagtgcacttctaagaactaacctttagtcactgggtgactttatgggagtaaaaggaagctgttatgaaatagctcttatggaactgtwacaagctttcaagcattcaaaggtctaaatgaaaaaggctaagtattatttcaaaaggcaagtatatcctaatatagcaaaacaaacaaagcaaaatccawcagctactcctccaattgaagtgatgaagcccaaataattcatatagcaaaatggagaaaattagaccggccatctaaaaatctgccattggtgaagtgatgaagaacatttactgtcttattccgaagcttgtcaattttgcaactcttggctgcctatggatttctgtggtgcagtgtacagttttaaatagctgcctaaagtcgtgtgtaactaatctggtaagtctcacaatctaatatttgtctttgcaggaactagaacatgtagcattcagcttgttataactgatagaattgttttctctttatgaggagttttcttatgagaagtggtggcaacaaggcaagatagattattttttcttaaataagttaggarcccttataattgcagaagataaagcaggctattttatttctttagggtatgtggtcatatattttttgggctagaggactgggtaaaggaggtttaaatggaatcaattttgccaattttgcacacttaaaaactttctatttaaacttatttattacaaagtcattagtagttgtcttgaaacctgaaatcggtttggccacaggataatgcctgctaattccagctgtgtagggagctggatgaaaaaggaagcagatacagwtgccatgtaaaataatattttaaagcaataattatttgtacatttctttatttctgtttgtgcatttattattttagttagtgagttttttatatggaaattcatgctttcattctcatttctgggtgtcatcccttctctaactattgtaccatctcttttcagttgtaatttagttgtgcttaaaacagtcactgaattaactttaaaaaccaagtactctatagacagagaaaatgcactcttyctgtctaaagacaaataaaatatcatgatagtttgcatatgaccctatctatagccatacttttaaacataatgcaagtactaaatatagtattcattatattattctaaagtattggagatagaattatgtggcagattaaaaagaaacttgcacttatacacttttgatttaaactgtagtttaaaacactacttaggtttaccatggttagtagcatttttttaaaagtttagtattttatataaatctttgccgaagacttcattgcctttaatatagaattgcatgctttagttttttatatttgtaacccaaacttaaaaatggaagaatggaactactaaatgtttcaactactgaatggaaaactaaatgttctaaaaaagattttaacttttttctaattataataagagtatacattttaaataaaatatttataacatagagaactacagaagaataaaaaacttctaattctagccctagtaatcttttgattgaattttcttttagtatttttcctcatatatatatatgtatacatatatatctataatttacacccagctatgcaaccagctttttcattacattgtattgtgagttttcccctagaccctgagatttttttagaaacagaatctttattatctttagagtattccattatatgaatgtaccaccataatttatttgttaatttccctgctactgaaactgattttagttgtttccaatattgcagtctccattttattttactgtcgttttatttattcttatctttttgtgtgggctccttgcttccagggtttggcagtaggaatagacagtttgttcctttgttgagttgccttccgttcaccacctacagagaatggcacagctgatgtgtggcaacagcaagagagacacggtctgccaatttgaccagtgaaagtactacatgttcccacatagggcctggagggacaaaagtgaagtgaatgtacaattgaatgtaaccatggttcacaggagaggatatacaaagtgctcaagtttattatattttctgcatcatttttaaaaacatggacwtttactctgaaggtcatctataattttattgggtgattcttgatattgagaaatgttttcttaaaaaaaaaaagycaccacaagaatgtcttgtccaaaaataaaatgttagaattgtgggccaaattgcacgaagcagagttctaygcttgagcattggtattttacattacttttatcttacgttaacagagatctgcatgtactagttgaaagtattaactgaaaagtttttttgaattctagaagccatgtgctgcagaaaacaacaaacaattaatgctcttcagaacwctagtattgtgagatcctttatgataaagaaaaaagaattcacggttgaatcatttgtggaagtgtattttgctatgccctctttttgtagattcacagggcacaataacatgttaaaagctttgtttaatcataattttcccatctttagcaacaaaacccttttttaatgtttccataagttattgggggaacaggtgctatttggttacatgagtaaattctttagtggtgatctgtgagattttggtgcacccatcagccatgtatacactacaccatatttgtagtcttttatccctcaccctgctcccactctttcccctaagtccccaaagcccattgtatcatttttatgcctttgcattctcatagttttgctcccacttatcagtgagaacatacgatgtttggttttccattcctgaattacatcacaaacccccttttttttttgaattaacaaatcacaacaactgaggaactaatattgagaagggctcaggagtatcaattccattcaataaatttcattcaatatcaatttattgaatggattccattcaataaattttcctaggtatctatgtatattcagctctgtggtggatgcaattcggaatacaaaagaagtgaattatgtaatcaatgccctaaagtaagttatcaaatactgagatatcaaggtttctatcactagacagttaaaggctgttacaaacatgatgtgcttttataatattagagggtgatgacaatacatttatttttgatttgtatcttaagttccaaagaaataaactgaaaatcaactgaaagactattagaaataataggatttggaagatttttaaaaaattaatgtacagacatgaaaaattgtcttgtatatcaatatataacattaaaacaaaataatataataagatcataattcagaaattttataaaatatttacaaattagcatagtttttattgctacaggaataaacctgtgagtaaaacagaatacaatcaagaaataaaaccatgtacataaagaatgtgaaatatgataaagatgacaattcaaaccaatgagttgctatccatgtagcataaaaaattcctacataactgccagattcaaataaatttcaggatatattttgtaaaaaggtatgacttttggttaagtgcgatggctcatgcctgtaattccagcactatgggaggctgaggcggacagttcccttcagcccaggagtttgagaccagcctgggcaacatggtgagactcctgtctctacaacaaatacaaaaattagctaggcgtggtggcatgcacctgtagtcccagctacttaggaggctgaggtgggaggattgattgagcagggaggtcgaggatgctgtcagctgtgattacaccactgtgctccagcctgggtgactctgtttctaagaaacaaaaacagaaaggtttacttaaatgcaaacagacaaataaacaaaacaaagcaagtgtttacttcataaaaatattagaagaaattggggtgactgtttctgtaatcttgaagtagaaatgccttaagaagcctaattaaaaaatttagactccctaaaaagaaattatcaataaatttgactacttagaaacttaaactgttatgacaacagwatacaataactgcaaagccaaaaagtggaaaaaaagtattacacatgataaataatgtttttaaagaaaaaatccctgatacacataaaagcatgtaagatgaatttagaatataaacagccacttcaaaaaagaagtataagtgtccatcaactgatgagtggatwaaaaaatgtgatatatatacaccatggaatactactcagccataaaaaggaatgaaataatgtctttgcagcaacttggatggagctggaggccattattctatggaggccattatttggccaggaatagaaaaccaaataccgtatgttctcacttataagtggtagctaagctatgggtacacaaaagcatgcagagtggtataatggactttggagactcagaagggggagggaaggagaggagtgagggatgaaaaactacatgttgggtacaatgtatactacttgggtgamaggtgcactaagatctcagacttcaccactatataatttatccatgtaaccaaaaacmacttgtaccccaaaaggtattggaaatatatatatatttcctatatatatatatattscaatataatatatataattccaatataatatgtattccaattcatatattccaatataatatataatatatattataaaaatggctaaaaagcatgtgataratattcaacctcacagcaaccacagaattgcagaataaaaataaattatcaatttttcttctatcaaattggcaaagataaaaacatttatagttgggaaaaggyacaggtaaacttctattttcatgaattgttggttggatgtaaatggataaatttctagaaaagaatgcgttattaaatctcaaaattgaaagagaaaatatacctctaatttatrcatcaaatttatctgaggatattattgtttaactaaccaaagatatgtatgcaaaaggctgttaacagcaagttgggacataatactactaatacatttctaagtgcctgcactgcactataataattattgcatttaattgaatcttcacagaagcttatgaattaagtattatcctacttatgtcccggatacgaccactaagtttagatrgcacaggtaactttgagaatatcacattgggagcaaatatcatgtggaattaaaatacagatcattctgctctgttccatttattattattattattattattatttaaaattttattattattatrctttaagttttagggtacatgtgcacaatgttcagttttgttacatatgtatacttgtgccatgttggtgtgctgcacccattaactcgtcatttagcattaggtatatctcctaatrctatccctcccccmtccccccaccccacaacatttattagggtaggaagtaaagaatgagattagttctgcctgaggtgggcagaatagaaaagcttatgtcaagaagtgggtattaggttaagmaagtttgagatctgggactgaatttgactactggaagcagataattggmgtagttggagctaaggcaaaccagcggggatcctaatgttcaaaatgaaaaatgtgattttggtggagattatggaaggcatccrgttaagagcacaggttctggagtcaatcactctgcccccttcaaatcctaatccaggtaatttactaaacttccctgtgccccagctgtaaaatgaggttaattatagcagctaccttatagggttgctgagatgattcaatgagatttagtgtaaaacacctataagagtgcctgaaacatagcaataattcaataaatgttagctattrtaattgtgaggagaagaatggggaatgagtggagattagggaagagtgttgacaaaatctgcctcattagaaacccttagacctgactgtgaggctaccctgcccaagaccatttgatggtcatttcactcagcccgttaaatttactcctgagaagagccatcaggactcactaccgttacagtgtgactatgatcatcaagaaatatctctgctctcctactgtttaaaatggaacacaaagactacccagcatccacccttttgcttttatgagttaacatgcatttttgaaggggtaggaaaagattcaattttcaactcattatctctcacctgatttttatttgcttgcrattcaaccaacttttgaacaaaatcatgaaaacacagtactattaagcactcggttgcaaaattcatctaacagatagaattcttactgtctaaatgtttattatctaaaaacaaaagccaataatcatccttcttcttttcctacaaatataaccggttagggaacggagtttaaaggaatcctcactcatgcttcaaattaaagaaaaaaacaggcaacatttgttctttggttcttgagtctgattacttttcaagtcaacccacacaatattaagccattggataatgttttcaagggacttttggagcatccttacatgggaraccactttgaattaatggatttactcctttagcacatcagtatttattgaacacctgtttctagcaggcagtgttccaggtgctgaggatggagtgaagagccaaatggatagaaagcaggagcatgctcagtgagctcagtgatagaatgctgctctcttctctctagcaagcacagaacactatgtgggtacttatctgattatctgatggcccagattatctgattgccatcctttgtaaactgtcttgtttatgaaggactctattcaaattatgaccagagagataacgagcaatttatagatctctgtccttagttcctatttcttttattttcctccagtataaaaaagttcttaaaatttgtatgtgagccataaaagagtaatcttatgttttactacataccaatttgcattttctccctgctcttaatkttaaaaaggaaaagtctgaacacagttcatcactcacctaggagtcctttgacttgattaactgacsaatgccacaggattatttaattctgcatgagactctctccctatagccacattcttactyccacctttgtagtacctgcaaagttcttaagacattatatctataatttgcaccagcattttgtctggtagtgatgaatttaatgcctctaaaacatttggctctttactttagagttacaaaatgcggaggaggcaacgttatttcaggaagcttttttaaaaggtgtgttagttacacggaacccagtactgatggctggtgtttactacctccttcttcatttcagggccagcagcttgaccttggcacaccacataatctgagtgaaccggtaagtaatttcttcagttgtcaagaatattacaatgtttgtgttgataatgaagggacaatgatcagattttatcacagtaagaattgctaagtaaaatctcatttatccttgctggaagaagacaaattgaaaataatgagaagtctgaatttatataaaaatgaagtgtgttgaagtggaaatagcacaggaccaatccaagtgcatgattttgtctctatgtaattgtgtggctttggacaaattacttaatttttctgagatttagttttattatgtgttatttgagatcgtctccaatatttcttctaacaatgacattttatggttttattactgttctgcacatgtattcatttgtttaacaagtgtttagtgacttaaggtataagcatgcacaagkcactgtgccaggaactagaaacttaacaatgaaaaaaatagggtctctgtttaaaaggactctcaacctttttgagatgcatacttaaaaccagagagacagacatatgcataaaattatggccagacagcatcatcagaaccagaattgtggtgtgtgtgaggagtgaaaagagaatacacaagagtaaaaggcacctcacttgcctgcaaggccttcaaactaaaactagaaagaggaagagttttccagatggactagaggggaaaaagcctatcgatcagagaaggccctttttgtcaagacacaaaggtgtgaagtagcctaagttgttaaggaaactgagtatttcagcttgcttggaaattggggtacatgtatagagggtagggaagtggaagacccattgccaagttacataccaattgccaagttacatggagccacattacgaagggccttgtctgccatgcttgctaagttggtcttaactcacaagttgttggaaagacatacagagttttagataagagtgtaaccaggttttgttttaaaaagatcactccaaatgtgggaacaagaggggtccttcctgaggtttttggcaagtggtaaatggcaaaacagaaaattgaggcagtgagtgatgaactcagatggattttagttaatgaccagataagtcaatagggcttcrtgatgggttttccatgakaggggagagtggggtgagagaagaaaacaccctggttccaggcttggacaactcaggagaatgtaacgcgttaatgggaaacacaggagaaagagcaaatttgaggatggaaagtaaggaattgaattccacatgatggatctgaagtgcttgtaggaacttaaatggagacatctaatgagccagtggatatctgggtctggagctcaggatggagcctcagctgcagttagaagtttgggggatatcaacatccagattacttgaagctgaggtaggggatgaactcgctccgggagaactagaagagtgagaggagaaaaagctgaagatggaacacaaacaccaaaggggtggagagaggcaaaaagagatggcaaaggagactgagcaggaagtaagaaaaaggaatccaggtgccaccgtggcctgtggagggaatggtcaagacaggtacagatgaattaagtaaggtaagaagaaatatatcaaatctgtctgatagcaggtcagggcaactcagggttttcagggcagctgtggggtgaaaggtgctagtaggcagccgactccccaaactgtctacctatttaggtttgacatgctaccatytagttgaatcaccagttttgagttttgcttgatatgtgaggacaccttagggacccaggatataccaatgccacattgtcctgggctttacctttgacaactacccagtgtacggtgtcttcgctgaaggttggctgttctctggcttctaggcctgcacatgccaggcttaactccactcagmaactctgctgccctgcagtgagccacaagacttgttctacctgtagataggacagctctgtttggaatcccaaaatcctggatcttttggaggcctcaggtttcttggtaggtttctatttctaaaacacagagtgatgccttttgttactacattgtactttcaggtgacaagaaaaagtcacatttcttcaatcactcaccattgtctgttattgtctcttgcagtgtatccaaggatgtcacttttggaactctgtagatcagaaaaactgtgctttaaagtgtgtaagtattaattagatttctattttgataytgatgtttctttcaagaggaaatttgtgtaagaggattcccatttgcatttccattggctttcaactagtttgcttgaccctaagacaaaacaaaacaaarctaaaaaaccaatagcctggataatacatagtaatggaaaagagattgagattaacatttttaatgtgactagaggtcacggaaggttattgccaataacagaacccagggatgttcaatcgctccaaaactataaatgttttttagtagaatctccggtatttgttaaatttcctaggcctatgcgtctcaaattttartgtgcaattatcygggatcttattaaaatgctgattctgattcaataggtcttgggtggagcctgagattctgcacttgtaacaagctcccaggtgttgcaatgctggtggttcccagaccacattttggataccagggccgtaggtcatgttcaaagtttctatgcaggaaatatagtaggtgtctaactcagggccgtaaacacctggtttactcccctttatgtaggaaatacatccccagatactttatttttcattttattatgtagcctggcttttgccactcagtgtgtaacttaaggtacttaaccccttggtactttacattcttcatccattttaggataataacagaatctttctcctaaagatagagcctgtcgtgttgtaactactctgatcacatgattaagaattttgccttttaaaagtgggttcccttgtttaggttgttcaggtcaggggttaaatcaataagaattgtggtaatgctggggaatcctaatgtcattttctattaatgagttaaattataacattgagatttaaataatgcattaacctctttttatatacatagtttttagagtatattcatagttttacttatatagtgtgtccttgcaaagttctattatagcagttacctatgcccactctcacatttgtgactgagtgcctcacagaatggaagttaccaaaaggtacagcatgtgctatctggacttagtggctattaaatatttctcagaaattgcaactcaaacaaataakttgtctagttgtgtgtttagtatcttttatcccaacatgtaagctgtgttggggcaggatgctgtctgtcttttttagattgttatctcttgcactgaatacagtgcagggcatatagcagctgctcagtcaacatttgctgaaggaatgaatgggaagcaccatttgttgctgggaaacaatccaggaggctgtgtggctgctgcagyggccagcatgggcagaggaatctgctgtcctttgctagcaagagctattggtggttttcatttcctgttctatttacctttggcatttgcaaatactccttcactctcttaacttggtccaccacagattacctcagcctgctgagatttttctggtggacatcatattctcccatttttccagtgatgcaaacagcttaatttttagagctgcttatacagtgtcctgcctagacagggggtcctgctctgggctcccttgtttctgttgtttttttggttgtttatcaatggtggggcaataaattaatttgaaatgattgtacagctcagtgtcactaaaattatttacaactttcaagattttaagtagtctttttttttttctatgcagaatgatacttatgccaccgtttgtgaggtgagttggcaatcacaaaaaagatgtaatcaagccacatgtcttcatctctggtctctaaaaagcttttaaaataggggtgaagaaacctaaaattctcagtgcactgagacattcttcctcaaagtgttattactctgagtatacagatgactgtaaaattccattttggcacaaatatttactgttttatgtatctatgtgcatgtatataatatatatgttcctatgkgcatacacacacattcaccatttgcatatatattactctaatctggtttgggaggttataatccctggaccctgggcagagttggagttggggtaatggaggggagagaaggaagaggcacattcagagatatctctgctgattccattttcttccccacaatgtatagtgctctatcattaaatataggacatkaaaagagaatcctttaattgcaactttctttcttgcttgcttgcttgcttactttcttgctttcttcctctctttctccctctctttctctctctttcttttctttctttcttctcacagtctcactctgtcacccagggtggagtgcagtggtgcaatctcggctgactgcaacctctgcctcccaggtttaagtgattctcctgcctcaactttctgagtagctggggctacaggcatgtgccaccatgcctggctaactttgtatttttagtagagatggggttttgccatgttggccaggctgatctcgaactcctgatttcaagtgatccacccacctcagcctcccgaagtgctgggattacaggcatgagccaccaagcctggccgtaattttctttcttgtgcaacaaaatcctttgccaacattttgcaagacagcttctacccaccccttctcccaatggtaagtaatgtctcacactgccctgcccaggtgtccttayggtgctctaagcaacctctgctacacttgattttctctctttcaaagagaccttgacgttttgatgtttcctacttagtcttcagctgaacttacctgtcctgtatttcatcccttcaaaataaggttatttgacaatagatgatatgaagaagctacattatttatcagtttaaaacctatgttggctgggtatggtggtgtgcacctgtartcccagctacttcggaggttcaagtaggaggattgctggaggtcaggagtttgagagcatcctgggaaacatagcacgactgtcccctaaagaaaaaaaactttaaaacctatgttgtattcttttttaaatatccttgaaactggtaaccagaagcctggggaagcagtataaattatccttcattagtaaaacagaaaaaattccctcttaatagagagcaaaaatacaammaaaaaattaaattggcatgttttctcagttgytactggttggttataaaaattgcatctgagcaatttttcttgggaatgggtggaggtgagggttggctaagaagagagacagaaaacagaggagaaaagtcacccatatgtaaagagacaaaggtctctcctcattgagatagaaaaaaaaattgcctgcaaatccttttatgtgatgaaagcaaaattacccccaaagaatagtccctaggataaatgtaccagtgtcaggaaaatcagggagagagagcctttaaagcatcgaagcagcccaggattagatctgtaatgtgmtaattctttgttaatcattatgctgctcagttttctgtgattatatagtgtaaatctttcctctcagtgttataacttgtataactattctttctctttatactttgctattttacactttaaaatgtttcactttaaataaagtagaactgaacaggaatacatgctatgtgtatatctatctatctatctatctgtctatctatctatgtacctatctatctatctatcacctcagttatccacayctttaggaaatcaaactccttactcattgatgtttgaacgtaggaagcttgtcatttttgcaattcwtatttcttggaaagaataatcttgaaagtgatagctcagtgaaatagaacttggaaaatgacgatggctagtgagatggcttgtccctgataattaaaacacaaattagatcttatcattgcatcttggcctttggctatatagctatatatagaatgaaacaaaagaatatatatacatatatatttatatatgtartataaaatagtcaaaatagatcttattatagccaattgatcttattgtacctgaaacatttcaatggctttttactgctctttggaaaaaattacaaaatacaaaggtctaccagctccactgcctgcctgtcttgacttcatctcatactctccccttggtctctgtgctggccayactgacctttccctctttcttgacatagaagacacattcctgcctcaaagttttcatcgtgctgttgcttctgcttttgcccaratctctgcaagcccagctcctcctaatgactgaagtcttggcttggatcaccctaataaagtctccttctctgcctagttatacctgtgcctttgacttattttcgtcctagcaattttcattatcagaattaytttttctttttaaaaatttgtcactcagttattayctacctccttctaagggaagtcctgtaaggcagggagtttaacttycttgcttactgtcatattcttagatcccaaaaccatgcttggcatgaaaaargccaattgttcaaatattcttgaatgaatgaatgaataatttttaagggaacaatgcctcagttcatatggagggcagtgggcgaggcttcctagtgttacagaagctggaaagggcactggcagcctgtgtgccagtctgggaaaccaagggtggagccagagggacaataaagatggactgactacgatgaggaagatgggaatgtgggggaacggagagagcaagctgatgtagcccctggaagagtatacttggcctccactgtgggaatggcagctcagtaacgtggaatattccacatgaatgtcccatccagaggcttcaggctcagattctgtaaattccttaaatccaaccatctttagattctctctaggcaactcaagcttgagaaacactggataactttatttgaagtccaatgttgaattgccaccatggttcagggcggggtgaagggaggtgaaaggagtggggggatggagagagtgggagggagggagggagagagagaagagagagagagagagagagagattgagagaaggaaacgtagtwgttagctttgcctccacttgagataacttttaaactcccagaaggatgggaattttattatcgatttcccctgaaaatatcagaaaaaacaggaccacaatttctcctgattgtcaagactacctatatttcaaaataatctgtatttccaaatacatctcgtctcttctcctcagttttcttttttggaaaaaaacccctcatgttatataataattttgctgtgaattggtttgtttattctctgcagttcataaatatgttgaaggcttcactaaaatatgtaaacaggatgsgaaacgtatactaaatcttgaaattaaataattccaaacccaaactgaggtatttaaattaatccttacctaagcaaacctgggcttatcaggcaccsttccttttagtatgcagatcaatcattgaactgttcatgtttgcaagttatagctcttctttttagggcaaatgtattgtgcctgctttccgctattaccatgagaaacaatagcatgttgtyctaggtattatagttacaagttgaaagacagcaggaagattgatcatgattgtgttgtagttttacaatatgcgccttttctgcaagtktgtgtgtgtgtgttttgtagctgatgttaatgcatctgttaagagttgcaggaaatttgtgtttcagtcatcaaattatgtactgtgttttycattaatgagataaaatgtaaatatcattaagttttcatagattttaaaactcagcattggtataaagatattcattgaaatattcagctactctacaaatttatagtccacttttaattttccaaggaagaccgggatatataaaataaataggtaatccctaagcatcattttactctaaagttttagattttaagctcattaaaacattgaccaaaatggcaagcagataattgtactgctaagctcagtgttttttcaaaccatacgatgtgacacattagagggtcgtcaaatcaattcagccaaccaagagtcacattaaacaaaatgaaacaatagaatagaatatcattgtacatataagagcacatcagagacaaggggtttcttttggggacaacgaaaatgttctaaaattagattgtggtgattattgcacaactctgaatattctaacagcactgaacygtgtactttaaatamgtgagtttatggcaggtgaatatatttcaataaaacttctaaaaatgrwgggaaaagtaaggatcatttsaggaatctttttttcaacatgtatgtgtgtactaagttgttttgttaaattattttttgctatggagcatggtcaaaagtttgggaaatgccagtctagcaagtgggaattttactgcaggggaaatagttgacataaagatgtacttgcgtattaggcactccgatttcaaagatttactcgtatattggtcaaagatrtacttgcmtattaggcattcggattttaaaatttagttgaagcttatcagcaaaaccagtatcaaggctgccctgactgtcatgctcyctgtcttccacagcgggagtcgtgtgaggttggctgtagcagcgcggaaggtgcatatgaagaggaagtactgggtaagaggacacacacgacttttaaaaaataggctgcaccactctagtgacttgtacttatgtaaagataaygaaacacctctcaaaacatcttgatttctgcatctcaatatgatcaaaaatatctatttagagaattcaataatttcaaaygtataggccattctgataaaattcagcaagattcttctttcagaacaaaacagagtaaacagtacatgactaatgtttaggaccagattttgtcctcaagttcagtaggtacactcacttctctcttaatgacagacaaatgtacatcctgagcagacttgatgtcagagaatgccactsttkttttttctstcttttttatttattyatttattttattatactttaagttttagkgtacatgtgcccaacgtgcaggtttgttacatatgtatacatgtgccatgttggtgtgctgcacccattaactcatsatttaacattaggtgtatctcctaatgctatccctccaccctccccccaccccacaacaggccctggtgtgtaatgttccccttcctgtgtccatgtgttctcattgttcaattaccacctatgagtgagaacatgcagtgtttggttttttgtcctygcgatagtttgctgagaatgatggtttccagcttcatccatgtccctacaaaggacaggaactcatcattttttatggctgcacagtattccatggtgtatgtgtgccacgttttcttaatccagtctatcattgttggacatttgggttggttccaagtctttgctgttgtgaatagtgctgcaataaacatacgtgtgcatgtgtctttatagcagcatgatttataatcctttgggtatatacccagtaatgggatggctgggtcaaatgatatttctagttctagatccctaaggaatcgccacactgacttccacaatggttgaactagtttacactcccaccaacagtgtaaaagtgttcctatttctccacatcctctccagcacctgttgtgtcctgactttttaatgaacgccgttctaactggtgtgagatggtatctcattgtggttttgatttgcatttctctgatggccagtgatgatgagcattttttcatgtgttttttggctgcataaatgtcttctttggagaagtgcctgttcgtwtccttcgcccactttttgatggggttgtttgtttttttcttgtaaatttgtttgagttcgttgtagattctggatattagccctttgtcagataagtagattgcaaaaattttctcccattctgtaggttgcctgttcastctgatggtagtttcttttgctgtgcagaagctctttagtttaattagatcccatttgtcaattttggcttttgttgccattgcttttggagttttagacatgaagtccttgcccatgcctatgtcctgaatggtattgcctaggttttcttctagggtttttatggttttaggtctaaygtttaagtctttaatccatcttgaattaatttttgtataaggtgtaaggaagggatccagtttcasctttctacatatggctagccagtattcccagcaccatttattaaatagggaatcctttccccatttcttgtttttgtaggtttgtcaaagatcaggtagttgtagatatgtggcattatttctgagggctctgttctcttcattggtctatatttctgttttggtaccagtaccatgctgttttggttactgtagcattgtagtataatgtgaagtcaggtagcgtgatgcctccagctttgttcttttggcttaggattgacttggcaatgtgggcatttttttggttccatgtgaactttaaagtagtttttctaattctgtgaagaaagtcattggtagctkgatggggatggcattgaatctgtaaattactttgggcagtatgttttaatgactggaaagtataggcatattgtattgaatgcacctttcattattcagctaaaagttatcctatagagtgcgtactgtgtgtatgactccccaaaaggctctagaaatttgtaaaaggtacagaaggtatgcttctcagtgttagattttgagcaagtagggggcttgggtgtttatcagctccctctgcctgatttcagcataggttgggcatgtcaaagtagctttgccttagtgtgttaactctctagtagtttctaacaggccagcgctttgataagtcatggcttggatgtcagcagatatcatttccagaattccctagggcatcctcccaccgagctgtagacagttcccttaagtctgaaggatgcttggctcttccatatgttgtagttcttgactcagtggcttgttccttgctctcagtggctgatggaaattggaaggggaaacttatcttgctgttctgatttgcttctgccctttagtgtcccacaaaagacaccctagacgtttctgtggagaggtagtgatattacattttttttttctgtgtcacgggaattagctgtggataaaatgtatattttatggkktccaagctgtgcactgatgtgctccaggccattacagcaatctcatgaggagccatggagtattttaracactcaaggtaaacacagagatatgtgaaatctgttggatggtgatacccaatctgatcataagattggaggagttgtgcagtgcccaacaggtacacaggccccattagcatgcaattatttttatttaaagatgaaataaatatacagttttatctttcaatttcktatttgtttcaaatatctaccaaattrttagataccaaattgactattaacacatacttattaagtgatactacttaaaaagtygaactgttagagaattcttttggttcagggaaccataaaaaaatttctgagaaactaaggacaccagaactgaggaagtgtggaatcttttatttacattcctttattatattctaaaattatattaccaacttaattatacaattctgttagaatacaagtgtaatcaatgctttatttttattttctcattggctatggatcaatgtctatgtaccactaacaaatgagatgtaccaagtctaaataaagacatttgtacttaaagaccatatctatagtctgttataatgaatcctttcatccatgatcctaagaccttatttgtctttaacacatctgatttctaggtcatttatcggtgagtatgctaygttcaytttagatacctcccatatctcttttcacatgatggaaaatggtaatagctaataacatattaaataaatagctaataacataataaataaataaataaacatatatatttgcatatacaaaatatgtatgcatgtatatgtgtgtgtgtatatatatatatgagagagagaragagagagacagagtctcattctgtcacccaggctggagtacaggggcacaatcacagctcactgtaacctcaaackcctgagttcaagcagtcctcctgcctcagcctcctgagtagctaggcatgagccaccatgcctggccaaaaatagctattttttattaggcatttatgagttgaccacttttctcattaattaatatgtattagctccttttgtcstcagagttatacatactattattaacctcatttyacaggtgagaaaattgaggcacaaagtttayatacttgcttgaggccacatagctggtaagggatatctctgaaaktataacccagctgcctggtaacagagccttttcttacccactgtgccatgtactgaaaataggatggagctcagtctagcttccctttttcatttggctctctctttgccttgatattttagcataaacctactttaccttttttttttcatatgtatcaccatggctttgaaatatgtctatgtttagctatgatatttacatttacttgtacttatataactgatcacatctgcccagttctcaacttttgtcatttctgatgcctcctrgttatttttcctcactctgctgacaactccatcattggactccccttcaaggtgtccacagcatacctaattcctgctattgagagtctcacaacaagaaagggaaggaaaatggagctgtgctttgcttattcagttataatagtcaaaaatgractataaaaagaagaataagcagagaagggttgtgctaggcctctttgtgggctaggtcctcggatgacaatggccttgatttttctggattacagagtatagactttatttggtccgtgtctggtgttggtaatgatgagaattgcgtcaattttctcttaaccagagtaaggtcccaggagtttgtaattaaccattttaagctccctaccaaatttaccatgctttctcaaccagagtgctgattttgtttctataaaagaaagcagaagcattaaattcatcacaattttggaaaaatataaaaagtagagtaaaatcatttcatcccagtgacataccattcagaaatctagcccttagtaccatgcctggcaagcagcacctgagaaattgctgccaattgtaatacgtctaatgtttagatgtcctgaaatattttataatgtgaaacagccaatcatagtgtcctttggagtaaaggcaattgctctgtacatataaaaaataatttcttgttaagatgcacagcaatagtagaattagagtataaaatttcagaaatatattggggtacacatcccaggataatggatggttctgttgtgccacagacatgctctgagcattggctcccccsgcctgtaagagagtggtattgwaagakaaaactggacagctcagaaccctctgtgtcatctgcctgtaaaagcaaaacctgaacaaaaaaatactgtgttcaaagataacaataaattctgtrgaaaaaagactgacagactgactgattgattttttaaaataaactgaatatgcataccattgattattcaagtgagttattgtggcaagrtgcagttttagcaagagaatacggagagccctagatgagagaggcacasactctcttgcgctgatggacaggagtgygtggtgagtgaaatcttgttttttccccagaaaatgcagacctwccaactgctccctttgcttcttccattggaagccacaatatgacattacgatggaaatctgcaaacttctctggagtaaaatacatcattcagtggaaatatgcacaacttctgggaagctggacttatmctaaggtatgaaaggctgcctttgtacctcaacccagaccccttcccaatttttttttttttttgagacggagtctcgctctgtcgcccaggctggagtgcagtggcgcgatctcagcttactgcaagctccgcctcttgggttcacaccattctcctgcctcagccgcccacaggcgcccgccatcgcgcccggctaattttttgtattttcagtagagacacggtttcaccgtgttagccaggatggtctcatctcctgacctcgtgatccgcccgcytcggcctcccaaagtgctgggattacaggcatgagccacctcgccctgcccccaatttttaaaagtgccaaattattacttataagcgtaaaggccttctagaaaagattcagctgtaagatgggtagttgggttcagatgaactttaatctcagctgctctgtaacatgctaatgctaagccttaacattaaggcttattttatagggaaaatatttattttataaggaaaatataatgttggacatatatactattccttcagtacagcatcacgtaaccattcacctcattagtcattatctgcccatcacagctaagatgagtctagctaggatggagggcagaagaaagattctcatgggggttgtagcaattcagaagtacggtctatggtggtcatccaggactgtgtcttttagggaagcatgagaaagtttagaaaaaaaaaaaatagtcccaagatactatgtgtactaacatagaaaaattcaagtccttgaggtaaatgccaaataattgaatccataattttgctattttgaaggggagaatttctgagtgaattctgcacgctgatatctgaatggcttagctctaagctccaggcctcttatttcatcttctctgttgagccatccatcttctacaaattaatctatgcttttkagtcccaatgtggggtgctgattctataatgctgatkattgatcactccttgatctagactgtgtccagaccgtcctatgtggtcaagcccctgcaccccttcactgagtacattttccragtggtttggatcttcacagcgcagctgcagctctactcccctccaagtcccagttacaggactcatcctcatggaggtatggtgtgcacacatttcttatgaaaggacattattccaaagctttgatttagtttgtttttattttaaacaatgaaataaatctattccttcctattaatcgatccattcaacaactgggtacataactatgtgccaggtagtattctaggtactcacaatacctttatgatcaaaagagacaatgacccctgctcctgtggagctcactttcttttttcttttcttttctttttttttttttttttggagacagagtcttgctctgttgcccaggctggaatgcagtggtgtgatcttggctcactgcaacctccacctcctgggttcaagtgattcccctgcctcagccttccaagcagctgggactcaggcatgcactaccatgcctggctaattttttgtatttttagtggagatggggtttcaccatgctggccaggctggtcttgtattcctgacctcaagtgatctgcccgccttggcctcccaaagtgctgggattataggygtgagccacctcgcccagctggagctcacatgttgttggaacagaaatattctgcartaaacataagaaataaataaagtatattgtaagtgggatggtgctgtgtgctatagtaagaggaatattttgagcagggtttgtcatttagrggattggaaatgaagagtgaagagggaaggagaggccagtggcagtatgaaataaggtggccagaatgagccttggtgagctggtggggtaaagtttgagcaaagacttaaaggaggcaaggaagtcaaccaggcagctatctcacatagagagtttcaggcagagggatggtccrtgtggaagacctaaggcaagaacatctgtggcctgatcaaggagcaactagaaggcccacgtggctgaacaagagtgcaggaggcagaggagtaacagctaaggtcagagagatgggggccagacccagtctacctcagggatcttggtaaggaatgtggcttttattctggaaggagagtcmctgtaaggttttgaggagaggagtgacaygatctgatgcgaactgccttatwcattaaaargaaaactggctgctgtatggagaatgaactctggggtgtgggaggaagcaggaagaactggtaggaagccatgtggtgacccaggtgagaggcccaggggtggtagtggtgtggtatagatatgtttggattctatttttatttcttgatgtaattttagtctttttattgcctaggttataaacttctttggctgtggaaaaataacatcagtaacaaaattcacctcctgttttttttttttttttttttttactgaaaagtttgttattttttgtattatatttttaatataattgaaaggaagattgcgcacttttttcattcattcaagtatttatcaaggactattatataccagacattgttctaggaactaaagatgataaaatcctaacccttatggagcttgcattccagctagggaagacagtccgataagtaattaagtaaaagtattttctgggttatgggaagacccaatgaatagcatccttcttcttagtctgaattctgaaccaataaaagataaaacaaaaacggccagaagatggctgcaggaatgtcaatattatttctgataagggccaaattgtatgatgatagattttaaagtaggaagtgcgatgtgacacatagccagagacttggtcgcayagggccatactgaccctgataaggagtacagattttattctaagtgggacagaatgtctttggagtgttctaaggaggggagggrcttgttcaaattttaaaactttcagtatggctgatgcatggagaatagactgggagggtggaaggagggccagggaagctggggagctgttaggaggccaagcaagtcaggcttgatttggtgatggctctgacwaggatggtgaygggaaaacagggaaaggtttgtcatatattttgaagattgagctgttggggtggctgaatggatttggcaaggaagatgggaaaatcaaagttgctaacttagactttcagtctgaacacctgaatgtcatcatttactgagacagggacaagggtaaaggaggagtggctttcctagataaaatcgtcagttctgttttggccaagcaaaatttgagatgtctgttagatatccaagtggagttgctgaggaagcaattaaayggaaggatttggaactgaggaggtaagtcgaaggtatccaaactaccaatttaggagttatcaccacggagatgtgattcaagccatgggcctggaggcaatatgctgaaagtgaatgtggttgaaaaaaggagaaggtcaaggtgtcagcccaagggcccttaatatttggtggctgggaagaagaagagggacagcaaaggacatggagaaggagagactcaggagcttgtggtgtctcaaagccaagtgataaaagtgtttcataaatgaaggtgattgagtatgaaacagtgacattatctctggaaagcaacaaaaagcttcttatctgctagattcctgcttcctcattttcccaccctttatacagaatgttgccctatcagaatataactttatctgagctgctgtcctctgaatactaatatatccttagagcaattctagctctaaataaatgttattgttctcttgttcaaaatatattcatgggatatctatagatgcatggatactttaagaagcttactcccttgtagaagagataaagcacatgcctaactaacctcatagtaaggtaaagctttattaaacacatagaaaasgtactgacaaattcccatggaagtttagaggagggaagtatttatttctgaaatgaaatatcaaataaatctctttggaggaagwctcatttgttgagttagacatgaggtgaggagagaaaagggcaggtccaggtgtctatgtgaccagggtcaccaagattggattctaaggcatggagggaaattagtcagtatgccatctgctggaagcatagaatacaggaagaaaaatagtgagaataacacygggaaggmagactaggtccagattaccaagaatcttaaatgtcctgggtaaggagtttgtactttatttagaatgcagttaggagctatggaaggttttaaagcacaatagtaattgcttcacttgcttctcaaaaagagaattttggcaactgcacatagaatagattgaragaatgagtgagatttgaaagtacagaggtagagaccagctgggaggttactatattattttaagattttatcaaaacagctttttaaaaacagaacatatattggggtattctctgacttattattttgaagatgtgacttccacaccaggaaaagcattcaagcctagaagccttagaggaaggcgaatgctggggcagacacygagggagagttgtctggtgccctcaccctcagagttagctgaggcaacccaggaagacatgctccaggctggatgccctaaccctcagctctggagatgtgcctatgtgcagagagcctcaggctgaactaggccttggacctaagcagagccgagcagctgatgaagtgggttggggcattttcccccttccctgatggttgctctctccttgcttgtcagatctcagggtttgtgtggccacctctgctgattattctgactattcttgcttagcgcctcagaccaaacactggcctaggaccatgttcgaaattttccagatcagaggagaatgaattcttccttgttccaagcaatgccatatgttatccaacagtgctgggacattttccggtgctacagaaataccgtgcagggacattggctgggcaaatcaaaataatgaaaacaaattttgctgttcatttctgggcctttctcctggataagcaagctcacataccctctgtgtcttctagaccctacatgggtgtccttcttatggatagcatctcatgtttctgattctcacttttctagctacatcaaaacttagaaacttatctgtattgtgttaattgcctcataaccctattctcttttagctgtgggaatgacatgattttagatggtgctattgcctttttttttttttttaagacagagtctcgctgttgcccaggctggagtacagtagcacgatctcagctcactgcaacctccacctcctgggttcaatcgattctcctgcctcagcctcctgagtagctgggactacaggtgcatgccaccatgcctggttactttttgtagttttagtagagatggggtttcaccatgttagccaggatggtctcaatctcctgacctcgtgatccgcccgcctcggcctcctaaagtgctgggattacaagcatgagtcaccgcgagtttttttttttttttttttgagacaaggtctcactctgtcacccaggttgcagtgcagtggcacaatttcggctcactgcaacttctgcctcctgggttcaagtgattcttgtgcctcagcctcccaggtagctgggattacaggcatgcgccaccatgcctggctaatttttgtaattttagtagagatgggtttttgccatgtaggccaggctgatctcgaactcctggcctcaagcgattggtccacgtttggccttccaaagtgctaggattacaggtgtaaaccactgcacccggcctaaatggtgctattgccttttaactgggtcytttcagaaaataatttcttaacaaaggaatgattgtcagacaagggataccagcatttcagggatgatttttgtgttgttgtttttttttcggtggggaagacctggacaatgatcgcatcttgccatgtaggtgacatttaacttgcttcaatggtggaagatcacatttgggcattgaccctaatgacttaaaattttgacattctaattatattataattcagtgggagaaatttatttcttccctgtttatcatggtgactgactacatggagccgaggagtgatgcaatgatgcttgtgtttgctgaaaattagtctgagagttagagatgaattgcatcagagaaaggctgagagagcaattaaaagggcttttaaaagtcagtggtgatgcagagcatttgccaaaagtgttcagagggagagaaatctactcaagagcaaagtaacttctaattgtgtctttcyatggaaagaggagagaaagagtctggttttaggggtttggtttgaaaagcaggtggagacacagatggaagctaggctgtcagatcatttgttgtcctttctttttccacttaagtagctgctggggactgtgtgtgaacgctcagttgtttcatacatgctcctttaatcctttgccagggcaggggtgctgaagctcagtcagcctggatttccaggacctgagagctggggtaaggaaartgtagtctgggtcattagagctgatgccaacaaaagtgaagccaactgttcgaattccagcttgtctgaacccacatctccagctggaaccagcaaggctgccccactcaaatgagtgaaaaggccccaggatggacttttttttaaactcgtcgatcattgactccagttttagtcagactctcctcttcttcctaaactggttccatcccatgtttcaactcatttaagtctctagagattcctgatgactttttttaaaagggccattattgtattcgtatacactatatttaattttatttcattaattagaagtgaggaaagtaacatttgaaagggcctcttgggaaaggagcgaactggtttagacatcttaccacctttcctctatcacatattttgagtattaataaaattatttcgtttccattaagttttcaaaaaaaaaaacaagacttttttccatcttattttaaaaacatcatgcttgcacatttttctgctcaytatgtcaccattatctcttccagttcctgaaactgcacctttgattaggaatattgagagctcaagtcccgacactgtggaagtyagctgggatccacctcaattcccaggtggacctattttgggttataacttaaggctgatcagcaaaaatcaaaaattagatgcagggacacagagaaccagtttccagttttactccactttaccaaatactatctacaggtaagaattaagtgatacagaggaaaatgtaaccagcatggctgcaggcatgataattatttaagaaatatgggtatcaaatagtttaaatgtgctttgagaagcgccactgactccatggtgttgggttgaagtcattgtggttttcctcaggcttatatgcctattagattatagcatcctaagcaaaaacattctcaagtatttctattatattcagaggatacttataaatatggctaataaagacatcgtaaacaccatgaatgtcaaattttcatttaatccaatatgaaaaaagtaaggaggtagagttctgtttaggcatttttattaaccattagggtaattattttattattgttagcttttctatcatttactagagcctctttaaattcggagaagaatgggggtcatgcagatagcagagttcagcttttgacctctatgaccctgaactgttctaggggaatgcaaacaaggatgtgattgatggtcatttcggtgctgagcagtggcaccacgtaactagactcatgcattgccacatcaccctttaaatagaaatgttattgctccttctatttttatctcatgttcacaccatgccatgtgaaacacgtctctccaaattgtttttggaataggttttctattgcagcagtaaatgaagttggtgagggtccagaagcagaatctagtattaccacttcatcttcagcaggtatgggtcaggcttcttcctttagctacacaggaatgagggtggcaagggtggtttcagagccagaagccctgggtcacctggtagacctcaagacccacctcttctgcccaaatgattattgtcttttgggtacttgttaagttttccattttaaatgaacctaagtatttgatgaattaaagtaagtggttagatattagaatttgggaattgaaaatcagaataaaaaatttagggttttaaaaaaatggcctcaaatctttggtttcagttgaaatcactagtgtttctgactcacatttacacacttaagggatacatataamttttctgccctaatccctattttagattatatataattatttaatatatatcagacattgttttccagtatctttgtttttaaatatatctggactttaataatttacattttactatataagtattcagtctgccaaagtatcttttattattttgtaagcaccctttctttttggctttggtgttttattgattacctcaagtgactgaatacttactgtatgatatatgtgtgagcaaaataacaaatgaaaatgctttctaagaagtactggaaatttgaggggaaactaataaaagatttttgagaacatccaragattcacaattctgggagsctgttttctatttttactagaaccctatttgctgacttgactgccccttactctaatctgtacatgcctgtgccaatgggtattgagtgtcatccatcatcagcctttgtttttttggctgttcctagactctaggaaaggagaggtatttttgttatgtaagaagcacgtccaaagggtgagttaaatatagagcagggttaaggttgttgttactgtgattattgcataacattcattaaataccctaaaaatgttcacccatgcaccttgtgtcagtctccacttgaacaggatatcaagcagagttctgcagccttccaatgtcattcctttaaggacctttcttctgccctaaaggcaaagatactgaagacaacacaragacaaccagtgtctgacaatatgtktgtgtcatgcataacccactctggcctggggtggaccacctccaccgagccaattctcatggctgaaaataatragctgagctggggcaaggttgttgagaatagtgatacatcatgtgatgtcatttctgggttatttaggggcatatgaacataaatcctatttgattgttactgtacttcctacctccaatcatagaataatgtgagttataccatagatgcaattctccagtgccattagagaaaatttgaccagcctctttcaagcactagtccccttgctttgaagggtagtactgatcttttttgtgtctgttagtgtacctgtggttggtctacctgtctgcaaattgtgttgtttttttcagttcaacaagaggaacagtggctctttttatccagaaaaacttctctaagaaagagatctttaaaacatttagtagatgaagcacattgccttcggttggatgctatataccataatattacaggtcagtatgataaggataaatgattccttagtgtgaaaagaagattctaaaagaagtacttctagaataaaagaaaatttttgaatatttctggaacatattctcttaatatcctaatatattagaataatttagaagaatattttcttttaaaataaaatacttctattttaatttattaatcattaaataaataaattctcattcatacaagttttttgtcctggttgttatataataatgtgtgtgcacttgcatggctcttctaggaatatctgttgatgtccaccagcaaattgtttatttctctgaaggaactctcatatgggcgaagaaggctgccaacatgtctgatgtatctgacctgagaattttttacagagsttcaggattaatttcttctatctccatagattggctttatcaaagaatgtatttcatcatggatgaactggttagtccgagaagttaaagaggaatagtgatagacagtgatactgwtatgcwtatcttggtatatttaatactaaacacaattgcyttattcaatacatactcaagtatttactatgccttagatactaggttatcaatgaatcatagatctggcctataggagggtgtagcctttacctagtgctagtcctgacatagcattaaatcacctttatttgtacttttttagagtcatgagtttatactaaaaataattcatcttctataagatagtggtggtacctgtcttattgttaggtaagactgccagtcatgatcaaagttagctgcaagcatttaaaattatatcataaccagagggaaatttagtagttctccaaaaacacagtagtactgtacttttcggaagaccattttttgttgttgttgktggtggtkgtggtgcataaggactattttgagctgatgaagacacagtcttgacatgtttcaaattctamttctttggaaggtacaggcttatcacagtaagcaacagccattgctgtggttgaaagtgcataaacctagatatcgcttaaatgttaaaaatagttgaatgcctctacaagccaggaaaataggcacttgtattgcattgatgtcaataatgtataaattcattaggatataggatataaaactgtcgtttaagggcttttttttgctcatttgtcttgggcagtgctcagtgcctagtacaattccaacagaacagatactcagggatacttgttggctgaatttaatgctgtatagacagatgctaatcctaccggtatattttttatttttttaggtatgtgtctgtgatttagagaactgctcaaacatcgaggaaattactccaccctctattagtgcacctcaaaaaattgtggctgattcatacaatgggtatgtgttagccttgtaaagatgaattctcttccattggsaataaataatctttgagaaacttgcttgctaatgaaacattgtagtaccagatgarcctatctatgcatcttactttaggtgaatttaattaaattcaggcaaagttttcattctgtagagccaggagggaatgttttttcaaacataaatcaactcttataaagtagttatttctctctccttcacagccaaatatgggaatatgggaaagacctcctgtctgggagtcaggggttgggttctagtcctggatttgccacttctttatcatgggattgagtctcactttcygcctcaacactacctgtgataaagccccttcattccacctgttccttttgctgagccattcaactgtagttcattcctctggtttggttctcacatctatcaagaggttctttaataagaaagctgctagcttccaccttaggagacaggagctgattgataactctgcctcctacccccaaatgaaatggacacattgtaccgcagtcttgctgttaaattggagtagtacctgaagcaagtaatatcatgtctatgaccattgatttatcaatccatatagggaaggtaataatacttacccagttgggttattttgaagacaaaatgaggtatttattgtgcatgtattttgtgaactccagatatatatgaatatgaaggataaacacatagaaagttattttggagttattatttctcagatatgaccagataataacagattagtaaccagtaggcaaagcccatgtttgtaagattaaacttttttctttcctgtaggaataaagttgctttcattttgaatgaaaaaaaaaatacagctcataacatgtttttcacaaacaaaactttcttttaaaaaagattgttcattatagattttaaaatcaagctttctattcctattcattcacaatttactaaagatttattttaacttctaggtttgaatgaattactgaattatggaatatttaatgctttgtgatgtaggacaaggattctctggatcttactgttttcatgtgtaaaggtctacggtcctatgaaatgtaactttgttgttgacacttacacaaaatgactcattctgaggataatgaactttacccactaatcratcattcaaatgcgatcactgaggtcttcagtggctctttttttccattaggataaaatggatttgtgcttagattttgcaatgtgactagaaatgataatgataattagtatttatactgaatgtgtgtttctaagtgtattatgtccaataattcatttaatttgtattcaaccctatgaaataagtacttttattattctagttttatagataaggaaagggaaacacgggttgattccgtaattgtctaagattatacagctgttttgcgatggaaccagtggaaccagacaggccctggaacaagaaatcttgctccaggacttctagctccagggcctgtcttctaaccatctctctataccatgataggagagtttctataaaaatcagcatgtaactttcagcaatagtttgtgtttagtagtcctaaaggacatcagatgtgtgaaacagtgtattgtcctggtattagaaatattttcctctatgctgttctttttgcactgcaaattgtctcctcattgagttcagacttactgtaaaacctctgcttttcttcctaccaccacttccccatcttcttccaccccagcttctcctcctcactctgtcctcctcttyccatgcaccagatctcttcaccttttctatttttctttctcttcctccctgcttcaatataataattgtaatatttaccacagatagttttccttttatctactctgaaattcctccaaattccattaacaattttgaatttaggaaacaaaagcagaaaattaagagccaagctgtttttgctttttgcctgctacaatccgtcctcagggaaaagaacatagctacatatctcaaaatggagcttatatctcaggatattattctagcataggagttttgagaaaattgatcaagatttggaatagtcatcaaggggaattagagcagaactaaataaggacaaggaaaatgatttgacagttttgatgagaggttggaatgctgccagtccttggggttgggataagaatttatcaaagtatacttctgttagcacctttctccataatcacgaattgtaaattagctacatccacattaatggttttatattttagttaaaagtttatttacatatttcattgtcaatgaaatattttggcagtatgttttctttttcattattaaaataacctgcctcgttactgtgaggtttgactttaaattagatgtgcttctctaattcttccgttggcttctttctcctgattgctggattttcctgcttcagtcatgtgtsgggtatttctttgtggtttataaaatggtagctctattgcctgcatcaattgtagattaaaaaaaattagtccactgcaaatgcaaagtagccatgctagttatagcaaaatgataactgtacaattaaaaatggtttaaatgttttactttcttccatttatcactcagaatgcatgagaaaatttactgataaaattagacttaaggatgtgtgttttttggaggaaaatgtttgatagtaaataccatatttagccatgtgatttctatatagtatgttttcctttaaaattttgaaagacccttcctggccagggctggtggctaatgcctgtaatcccagcactttgggaagccaaggtgtgcagatcacttgagcccaggagttcaggactagcttgggcaacacggtgataccctgtctccacaaaaaatacaaaaattagccgagcacggtggcaagcctgtggtcccagctacatgggatactgaggtgtgggaggatcacctgaacccaggaggttgaggctgcagtgagctgtgattgtgtcactgaactccagcctgggtgacagagtaagaccttgtctcaaaaaaataaaagacccttcctgtttttgaattttttgattccttaaaaagtcacttataataattaagagactaagcattacaagtgaggctgaaattttctaatgttccaacttgtaacttaaacgaatagagtatatcttaggaaattacctttttctaccttggaaaatcctgtacttagcaacatcagagatacatagttctgattgtgcaacagaatgaagcaattagctgaggaggttactcatcaacctttggactgaatctcatgaggtttcttttgttcctgtgtcaggtatgtcttttacctcctgagagatggcatttatagagcagaccttcctgtaccatctggccggtgtgcagaagctgtgcgtattgtggagagttgcacgttaaaggactttgcaatcragccacaagccaagcgaatcatttacttcaatgacactgcccaagtcttcatgtcaacatttctggatggctctgcttcccatctcatcctacctcgcatcccctttgctgatgtgaaaagttttgcttgtgaaaacaatgactttcttgtcacagatggcaaggtcattttccaacaggatgctttgtcttttaatgaattcatcgtgggatgtgacctgagtcacatrgaagaatttgggtttggtaacttggtcatctttggctcatcctcccagctgcaccctctgccaggccgcccgcaggagctttcggtgctgtttggctctcaccaggctcttgttcaatggaagcctcctgcccttgccataggagccagtgagtgctctgtccccagtgtggttactggccttgctggaataagaggaaggtttgaactgcttggcgttgtgattcaattttgagagccccatttggctattcagtcatcaaccagaagcagctacttagctaaaaaaaaagtttatacatttgttctgcatttattagttttacattaggagaatctctatacttctcatgtatatcccaatagaataatttgaacatttattgagtgtctgctaagatccaggcattgacattctagtcagaacaaatagccagggagatagaatacttgggttgagattttttgtgctgttgaaagcttgcatgaatttcagcaattccctaaaactctgaactcgaatctccatctctggagagaggtagtatgtgggtgggtaagcaggtgggctctggagtcagcctgcacggattcaaatacttgccatttgttaatagaatgaccctgggcaagttactaaaccactctgtgtctcagtttccacacctggaaayggggaatatttattatatcttttaatggaactgttgtacagataaaattaaaacacattagtagagcacttagaacagtatctagcacagaggtcagcaaactttttctgtaaaggaaagaccagatagtaaatatttttatttactttgtgggtcagatggtccctgtcagctactcaattatgtcgttgtagtgtgaagacagtcatagataatatgtaaatgaataactgtggctgtgttccattacaactttatttacagaaacagtgggccaggtttggcctgtgagtggagtttgccaatccctgatcccctagacgatagtaagtatttagaaaacattggctgtttttgctttagaacaaagttaattatgtctgtttgctgcatatctcaaagatggctgaaaatgaataggtaatttttttttattgattgggcttcttggaggaaggtactatacaaacagtggtaattacattaaaggttcatcattaagcattttttattaagagcctgattatatctattagtgttgtagagaacccctctgacaattatatgcagcaagcatatagctttgactgaaggacagtcctatttgttgggaatgctgtctccttcaatgcagccaaatgagcggcatgaggaatgaacactgtcctagcctcatcaacaaatgatccctggtgattatcggggtagcggatattactgcccaattgctctcccatttgagatgaggctgtaggtgaatttatggagaatccttggtttgcccttgcagatgtcatcctgatcagtgatattattgaactctttgaattaggcccttctgcctggcagaactggacctatgaggtgaaagtatccacccaagaccctcctgaagtcactcatattttcttgaacataagtggaaccatgctgaatgtacctgagctgcagagtgctatgaaatacaaggtttctgtgagagcaagttytccaaagaggccaggcccctggtcagarccctcagtgggtactaccctggtgccaggtgagaaaatgttctggatttagggagtgactctcacaaaaagaggactagctgagtgccctttaaatttccttgccttgggtttaaagaaatgagaatgagggtgtattgacctcttgagtatgtgtttgagtaaacacatattgagtacatatttattttctgagattaggaaagcaaataaagcactgtgtgatatttaattagtgtttctaacctgccattttaaactttccaagatattttttaaggaaacactataattgwttctttacgggtttcttctttcttatggtatattaagcagtggcatttctgaactctgagggtcttgctgagagaagttgagaggctgtgaattatgctgaattccatcctcttggctgaaaagaaatggaaggatgactataccattcatattactattgttaacacagtctcttctggatgctctgaatgagaccatgacaaacagtagtcaaagccccctcaaaaaaaattctgcaatgatcaagacaccgttatagaggcaatctcaccatgcgtttttcttcacatttcaaaaatttatgtgaaaatcagaaagtatgtttaatgggatcattcttgttacacagataacaattactcatatccttttatagaacttttcaaagtgttgacattcttttactttatatagaaaatcataagatataaggcatagatataagtatataagatacctttaaagagtttgctttccctgatgtttcttttaatttcttttttactaaacagctagtgaaccaccatttatcatggctgtgaaagaagatgggctttggagtaaaccattaaatagctttggcccaggagagttcttatcctctgatataggaaatgtgtcaggtaaaccccaagtcctctgttcacttgaatgacagatttctactcataagacttcccacatcattcaatgaatcaaaagaatagggtatttttgtatttggtcaatagtgaaaggaaaaaatattgactgaactctactgccagtgattctgttaagaaaatgtcagttcttagataggaacgctatttattaagtcacaaaatgtgaggttgtttctagttttatgcccaccaggaaggctttgatataatgctgatgtattaatctaccaatgccatctcacattaacagcctatcttgttccactaagacagttatacttaaataatttactgtgcatttgctataagacaggagcagaaactgctgcatagagttctaaataaggtataaggaataattggttgacaaagaggattattaagtaatgaatgggtaatttgcctggaaggcgttagaaggaagaaaagtcttcattctagggtgttataacagtgatcttgcctgaagatgacatcttccatagttatctaattgtttattgatttatttggccattaaaagtacaacagcatttctgaccaacataggagccaaatgtaggtaatgtggcaccaatggagagaatgccactttggcattggctgagtctgggcttcctcttgatgtatctgtgagccctcaggcagaacacatgatctcaccttgtctcaggtttaccatctcaaaaatgagaataattcctacttcataattttgttttaggaactaaatgagatctgtaaactgcctgggacaatgtttggcaaagaggagatgctcgatgtgtatccactgttctccctggtttcaggggttaagagtttgggaaacattatttaaatattcttgacagatcaagttctagtgaatatgtgtcagtgtgttgtttaaaattatgttgaggtgcagatgtgatttgttgactcattatgtttttgttggtatgtatgaaaaataactgctaatcattcactttattttgagacatggattggtataacaacagcctctactacagtgacacgaaaggcgacgtttttgtgtggctgctgaatgggacggatatctcagagaattatcacctacccagcattgcaggagcaggggctttagcttttgagtggctgggtcactttctctactgggctggaaagacatatgtggtgagttaaagcatggcattctggatgctctagaatgatacttatccacttcagtgacttgcacaccaatttcttttttttttttaaatacctgtgcaccacttatgctattatttatttaatgtttatctttaaaccaagtcacttaaacattttttttttctttttttgagacacaatttcaccctgctgcccaggctggagtgcagtggcgccatcttggcctctgcctcccgagtagctggaattacaggcatatgccaccatgcctggctacttcttgcattttcagtggagatggggtttcaccacgttggccaggctggtctcgaactcctgacctcaagagatctgcctgcctcggcctcccaaagtgctgggattacaggcgtgagccaccgctcccggcctcatctcacttttaaaatatgtttttttgtaaattaaatttgttatcactatttgttgaattaggtattttttccccaataatartttaaataaatacatgaaaatgctcacctgagcgttggttcttggcaggaacatggcatgctccaaaagcatgattcaaggcaactaagtgaagagactattttcaaaggtgtgcacagggctagggaaaatgaacaaatgatggtgaggcatcctcacggtttacaagtgtgcgaagacataagtctaggtgtgaataggcaaggggaagaagtggaagaacctggtgagggctgtagctgtaggagagtagctgatatggactgtgactttaggcacagaagctggccactatcaagatgtatggtctggcaaggagccagctaaaggaataagaaccccaacccctccttcctcctgccctctaatctgccagtgcttccattggctgaacctccccagaagccagacaacaacccttcagcctagcagataaagtccatagatgttggcctatgggggcacagagtagggtggagaagggtgggaattagacctagaggcaaaataaagacatccagcacacctgtggagtgatatattttgaagagaaagatgatggctaatgacaagaacattggcctgacagatcaagaaataaggtattgaaataatttttaatcaggaaagtacttgctgtccatttatttatttgtccagcaatcatttatctactaccaatgcgttgaaatccttgaaagaaggcaargtagggaatataaaacaaatagccgacatgtccctgctattttaaaaacaactttgttgtgatataattcacataacacaaaattcattcttttattgtgtagaattcagagattttttagtgtgtccattgatgtacagccatcatcagttgtccctgctcttctgaggagataaaatacatatataaaataaagaagcatatgaagcaatgtatttagagacaaagcaatatggtacaatctgaattcataagtgccaaagatgtgcaagcagaatgaaattgagtggggttagtcagaaaacactccctcaaataggttagtttaaaaatagttttgaaaaaggaaatggaagagtggacataaaaaccagttttaagtattttctctatctcttattaaagtgtttaactccaggacaaattgtttaactttaatccactttacctgtgaaaaaatagggaatagaaatccttcataagcttaatgtgaggattacaggagtttatatttttaaagataaaaaagtacagtgcctggcacattattgataatcatgaaatattagggaactacactgatagagaagagcaaggagagatgtcatcatttatagggacataaacatcttttttcgggagtctaatcaaatatattcctatccagcagtgttcacattgtctggatgtataattaggaaaagcagttatttttatgcaaagtaaatttagttcccttctctttggaggcatgaaaacagataagccccatgagggcaggtgccatgcctgtttgcttgttgctgtgtttccaaggcttattacactacccagcacatagtrccaatcactatttgtggttgaatgaatgaatgattaatcaagcaatttattartgattgcaataaatattcagaaataatartgtcacttgaaagccattaactggccatacaattatgttttttagatacaaaggcagtctgtgttgacgggacacacagacattgttacccacgtgaagctattggtgartgacatggtggtggattcagttggtggatatctctactggaccacactctattcagtggaaagcaccagactaaatggggaaagttcccttgtactacagacacagccttggttttctgggaaaaaggtgacaaattaaaagatctgatcatttagtaatactgaatagctctatatttatgataatactttctctcgcttattgtgagtacttaaagcagactcctaaaggaaatagtgttttggtaagatcttggtttaaccaagttttctgttatttgaaaaaaaarmgccttatttgatggtcacaattgaaagccttatttgatggtgataagtgattatgtaagttcaaatgcactatggagattttttttgtttactttattttgagtgaacccaacttaaaagtattttaatttataactgtttttatagtcttaaggacttctgttgaatattttagaagctttgaatcaggtggtgactaggcattttactattttcaatcagttttgggcactgactgttttaaaaactgtttctaaaaactaggcaaatgatttcacttctccgtgtttctttccttatctgaaaaatgggactgttaactattattctacctcctaagtttttttttataaagattatatgagagtattcatgaggagtgggaatagttccaggtacaaagtaaatgctccgtagttaagctcatattattattactcaacctgcaaatacaggaatgtttctaaagcaaatgttacttttacttcctcagcttttacaagcaataactatttttgttgattctgtttagctacccactaggtatccatctaagtttctaaattttaattttttctgaccataatagtgacatatttcaactgtgaaaaacttgaaaattgcagaaatgcattaagaataaataaattattcacaccatttctacctaatayatcccttaagattttcttattttaagtcatttttttctgcagagataaaatatacataatacagaataccagatgattttaaaaatrtatgtatatatatgaactaatagttgagtcacttgatctccaattccaataacatatatgggccataattcctaggatatttaaagagacctgatttgcattacatggattataacacagacatttaaaagagatggaaatttatgtaccatatccaaagacaatcattcttgtcaaataataaaaaggtctcttaattctattttggagtcacttgagtctgaatacaaagaaagcatttttttttgtttttcaaaaaatataattgttagggaaaagcattttcatttttgtaaaaacatattgataatattatctcaagagtaacttcttctccacctcagggactttgtcagtaatcttcccagtgttctgatatggttgtttgagtactctcactagccaggataaagctctggtgtgaccttggggacttccccataaatgagtgagtcatctcagcatgtttgggggaaattcatccttcttacccctctttaaatcccccctccaaacgcttatacactgcagatggggatgtaaattagtacaacctctatggaaaacagtgcagagatttcttaaagaactaatagtatttctatcattcgatccagcaatcccactactgggtatctccccaaaggaaaagaagttattatatcaaaaagacacctgcacacatatgtttatggcagcacaatttgcaattgcaaagatagggaaccaacctaagtgcccatcaactgattagtggatggataaagaaaatgtggtataaatacaccatagaataccactcagccataaaaaaaaggaggaaataatgtcttttgcagcaatttggatggagctggaggccattattctaagtaaagtaactcaggaatggcaaaccaaatactatatgttctcacttataagtgggagctaagccatgggtatgcaaaagcatacagagtaatataatagactttggagactcagaaggagggagggtggaagttgggtgggggataaaaaaaaccctacatattgggtacrtttttacactactcaggtgactggtgcactgaaatctcagcctttacagctgtacaattcatccatgtgaccaaaaactacctgtaccccaaaaagctattgaagttaaaaatatatatataataaaagcaaaagaatggaaattaaccaaaaaaaaaaaaaaacagtcctctgcaaatcctctcccaggttgtcaagtgctgttgttgcttttgcaaatctgtgttctggttccatggtttgatgtctaatctatctgactcccttagtgacagtggatgttttgaaggcaatgcattttgcatccagcaaagctcttcatctctctcttgttcattgatgtcatgtacagatttattatgcagtaataatatattttgcaatcagccgacataatgaaatacagtcaggcaattatttatagaaaggcccaattacttgtgtgataaaaaaagaatgaacaaagtaagagattcttctaaggtaaaaagataccttttgccacatctgatgagctcaactcacagcatatggtacattttaccacagaattaaaatttagcataagggttttagtttagatcagagaggtttatataaaaggtatggagtaccctctgactgtttaaatatgaagctgctgactgctgtggaggaatgggatgatgactcaacacctgaattttacttagagtttgaatagtttgttgtattccagcaaaaaattgtagaatctcctttttaaaatagatgaaatagacttaatttgtaatgtagaaactctagtgtatctcattgtaaataaccaaacaaggttaacctgatttctytttaactgaaaaaaaaaaatcaatagatctctctcagcatggagcaaggacatgattcaactcctaaaaggctgagaattgccagaatacatttttaccttctggagaataagttggttgaattttcctgaagatagaaggctgtgatttgtatgacaaccgaagggtttttgtcgtcatgtaccttataactgtttctttgtagcaggataacttttcaggaagaatttttagctcttggataccttattgtagtcttttcacatctttcactggctcatcatatttgtttaaatgctgctgtatcttgctgaagatgtagtcgtcaactttaattctattggttatacctcacagcttctaggtatgttacagggagattgcactgctccgaaatcaggctactggcaatcttagcttatttgaaaaatatttgtaaagccaaagawagcaaaaacaggatctttggatagtaacttctatctgtctcatggattctatgccatatctcatggattctgtgccatcaggcctcatctagatgactggatgtaaacttaagatatacattgcaacaagaaagcaaagagtagtaagaagtggttctcatatgtcatctggaaatagggctttatatacacattactattcaattttaatacataaacatcctttgtgtatgatctttttaaagtgtatgagaatgttttgggttgcaattaatagaaaatacaattcaaaatggtttaaaccattggtggcacgttggaatcacctgagaagttttaaagcatactggagcctaggttccatccccagagatcataattaatagagtgcagcctgggaattgagatttttaaaaaactccacagatcattgtaatatgcagctatgtttgataacaacaggtttaaacaacaacaaaattcactggctcatgttgctaaakaggccagagttaccactacctttaggcaagcttgacacaggctcaacatttcagattcagtaactctggagtgtgactgataatttatatttgttccaagcttccaggtgatgctgttgctgcaggtctgagaatcatactttgataattactggagctaagtatataaaagtgaataatacactccttgcctttttgtaaaattttaggacaccagtgtttatatccaaataacagtaataagcataatcatataagttttatagtcagaaaaaagtaaaaattactgaatttattattccaaagaggatgttaaagagaaatctatagcttaagtgtgacctgttcacaaagttatrcttcaaacatgtatttggtttattttcttaccttactttctacttaggtaattgctctaactttagacctcagtgatgggctcctgtatyggttggttcaagacagtcaatgtattcacctgtacacagctgttcttcggggacagaggtaagtagagtccctcaaaggcaattgattgagaagaaaacttgtcagtcataaatsataatgcatggaaattcatttattccttcaataaacattttctggttatccactgtgttgcaggcattgggcttgtagggtaaagaggtttgtaaataactagttacagtagaatatggtaagtgctgtgatggggtatgaagagagtacagtatagacactcaggagaatgctgcytaagagcccaggaagtgtatggataagcttttctgcttcttcacaaaatagagtatacattatggagtgaaggcagaactcttcctgtgatgtcttaaatgaaaattagagagtgaaagggaccacatgaattatctccttgatctgtgtcctcaarcttatccccctgtcctgatcttgtcrgtatctctacatcttccacattagcattgtcagatattttaaaaataaattttacacttttattttaaaaaattagttaaaatatacataatgtgaaatattcagatcttaagtgttccattacatcagtttagacaaatgcattttgagacacagaacatatccatcatcacaaaaaattcctgtgccccttgccaatcaatctgcaccactccagaaatatgtactttttgtatctggcttcttttacttggcatacaatcttttgcgatatattcactttgttatgtgtactagtttttcttttttattactgagtggtattccattgtgtgaagataccactgtctgtgtatccattctatgcatgtcttgatggacattttaattgcttcctaattttggttattatgcataaaactgaatatttgtatacaaggctttttgtggatgtatacttggataaatacctaggagtagaattgctgggtgatagggtagatagatgtttatattcttaagtaattgccagtttttcaaaatgtttgtgccattttacattcccataaaaaatgtatgaaaattgtggttcttccatatcctctcaacagttggctttgacaatctttattatattcaccattctttggtgtgggragcagtaaatattgtgattttaaccagcacttccctgatgactatcaattttgatcactttttcatttgttatcagccatttatatatcttcttttatgatatgcctgttcaagtatttttctcatttttaaatgagttgtcttttcattattgggttgttctgtatataagcactttgtcaaaatatgtgttgtgaatattttgtctcagtgtttagtttatctgcttattttcttggtggtgtgctttgatgagaagaatttcatttcgattaagtccaatttatgcattttctatattctgtgctttctgtgttttctacaagaaatcttagcctatcccaaagttgtgaagattttatactccattttttctagaagctttatcgttttagctttcatgattagatctataattcatcgtaaatttattttggggtatgttgtgagatatgagttaaagttttctttttttcctttctgtagggatatccagttgttctagcgccatttgctgaagagattttctctttctttatttagttgctttgggacctttattgaaaataatttgggccgggcrtggtggctcacgcctgtaatcccagcactttgggaggctgacatgggtggatagcctaaggtcaggagttcgagaccagcctgaccaacgtggtgaaactccgtctctactaaaaatacaaaaactagctgagcgtggtgatgggygcctgtaatcccagctactcagaaggctgaggcatgagaatcaattgaaccggggaggcagaggttacagtgagctgagatcgcgccattgcactccagcctgggcaacaagagtgaaactctgtcaaaataataataataataatttgactgtgtatgtgtaggtctatttctggactctctgttctgttcctttgatatatttgtctactctttttgccagtactacattgtcttgataactgtaaattcagagaaaaacttgaagacaggcaaattcagtccttctactttgctttgcttttccaatatttttattttggctatacttgatcttttgcctttccaaatagattttaaaatcatctcactaatttctagaataaatcctgctggaattttgaatctcttttcagtttaggaagaatgaatatctcaaaattttgaatcttccaatcaatgaaaatggtgtatctctccatttttttaggttttctttratttctctcagaagtgttttatagtttttagtgtagatgtctaacatatcttttattaggttaatgcctaggtatctaatttttttaatgctttatatatgttaytttttaaaattccattttctaaatgttcattactagtgtgggaaaatacaattgctttttgtatatgactttgtatcttatacatttttaagttaatttatatgtcctagtagatttcttctagaatactttagtaagagttatagtagtctcaaaaatgacttaggaagcattctctcctcaattttctgaaagcatttgtatagaattgctgttaattcttctttagttttgataaagtccacaagctaattcatctggacctggagttttctttgtggaaaattatttgattacaaattcagcatcttttaaggatataaggctatttatttttatttcttcttgagccagtttggtaattcatgctttcaagaatttgtcattttgcatgagttttcaaattttataatatcctcttaatatcattttaatgtctatagggtctgtcgtgatatccttttatacttctgctattggtacatttttttcttgatcactcctgctaaaagtttatgagatttatttatcttttcaaataatctgtttctggcattattgatttttttctgattgtccattttttatttcattaacttctaatcttattattttcccttttctatttattttaggcataattttctgttctttttctagctttttagattgaaaagaaaggtcattgtttttgtatcattccactcactggcatttaaaactatgagtttctttcaaggtctatattagttgtattcaacaaattttggtatgtctccaactatgattgttgatttgcctattgttctttttggttaatgtatttgggtgctttatatttagtatattgattatctatatacttaattatattgcctttttatcattataaaatactcctattcatctatgctaatattcttcatcttaaagattcctttgtctgatattactatggccacatcagctttcttttgcttagtgtttgcatagtacagctatttccatttatttacttttaaattgtgttgtttacatttattgtattgttttattgttggttttaaattttttattttagtttaaggggtacatgtgcaggtaggttctatagatagtgtgtcctgggggtttggggtacagattgttacccaggtaacaagcatattacccaataggtaggttttcttttttwaaaaaatttatttaattcaataggtttttggggatttggttacatggataagttctttagtggtgaattctgaaattttggtaaacccatcacctgagtggtgtacactgtacccagtgtgtagtcttttatccctcaccctcctcccaccctttactccaaatccccaaagtccattgtatcattcttatgcctttgcatcctcacagcctaactcccacttatgagtgagaatgtactttttggttttccattcctggttacttcacttagaataacggtctccaattccatccaggttgctatgaatgccattattttgttcttttttatggctgagtagtattccattatatatacaccacattttctttattcaataattgatgggcatttggactggttccatatttttgcaatcatgaattgtgctactataaacatgcatgtgcatgtatcttttttgtataatgacttcttttccttgggtggatacccaatagtgggactgctggatcaaatggtagatctacttttagttcttgaaggaattttcacactgttttccatagtggttgtactagtttacattcccatcagcagtgtaagagtgttccctcttcaccacatccatgccaacatctattatttgagatggtttgcttttttcttgttgatttgtgtgagttccttgtagtttctggatattagtcctttgtcaaatacatagtttgtgaatattttctcccactctgtgggttgtctgtttactctgctgattattttgctgtgcagaagctttttagtttaattaaattccatctatttatctttgtttttgttgcatttgattttgggttctttgtcatgaagtctttgcctaagccaatgtctagaagggtttcttcgatgttatcttctagaattgttaaggttttaggtcttagatttaagtctttgatccatcttgagttgatttttgtataaggcaagagatgaggatccagtttcattcttctacatgtggctttccaattatcccagcaccatttgttgaatagggtatcctttccctactttagtttttgtttgctttgtcgaagatcagttggctttatttctgggttctctattttgttactttgatatgtgtgtctatttttatacaagtaccatactgttttggtgactatagccttatagtacagtttgaagtcaggtaatgtgatgcctccagatttgttctttttgcttagtcttgctttggctatatgggctcttttttggttcyacatgcattttaggattgttctctcttgttctgtgaagaatgatgctggtatttcaatgggaattacattgaatttgtagattgcttttggcagtatggtcattttcacaatagtgattctacccatccatgagcatgggatgtgtttccatttgtttgtatcatctatgatttctttcagcagtattgtgtagttttgtagaagtcttttatcttcttaggtacatttgtgagtatatttttgcagctattgtaaaaggggttgaattattgatttgattctcagcttggtcgctgttggtatatagcagtgctgagaggtgacaacgtgctagcagccctcgctcactctcagcacctctttggccttgatgtctgctctggccatgcttgaggagcccttcaggctgccgctgcactktggtagcccctctctgggctggctgaggctgaagccagctccctctgcttgtgcggaggtgtggagggagagacgcaggtgggaaccagggctacgtgtggtggtcgcaggccagcacgagttctgggtgggtgcgggcttggcgggccccgcactcagagcggctggccagtgccaccagccccgggcagtgaggggcttagcatccaggccagcagctgtggagaggggcaccaggtcccccagcactgctggcctgcccgcgccatgctcgaattctcgccgggcctcagcgcctccctgcggggcaaggctcgggacctgcatcctgccatgcccaagtccccccgtggtgggcttccgcgcagcccgagcctccctgatgggtgccgccccctgctccrtggcgcccgatcccattgaccgcccaagggctgaggagtgcaggcgcatggtgtaggactggcgggcagctccacccacggccctggcacaggatccactaggygaagccagatgggctcctgagtcaggtggagacttggagaacttttatgtctagctggaggattgtatatgcaccaatcagcactctgtgtctagctcagggttcatggatgcaccaatcagcactctgtatctagctaatctggtagggacttggagaacttttatgtctagctaaaggattgcaaatacaccaatcagcactctgtgtttagctcaggtattgtaaacgcaccaagcagcaccctatcaaaacggaccaatcagctctctgtaaaatggaccaatcagctctctgtaaaatgggccaatcagcagaatgtgggtggggccagataagggaataaaagcaggctgcccaagccagctgtggcaacccgaatggatccttttccacagtgtagaagctttgttcttttgctctttgtgataagtgtggctgctgcttactttttggctccacactgcgtttatgagctgtaacacttaccctgaaggtctacagcttcactcctgaggccagtgagaccacgaacccagtgagaggaatgagygactccagatgcgccascttaagagctgtaacaytcaccacgaaggtctgcagcttcactcctgaagccagagagaccacgaacccaccagaaggaagaaactccaaacacatccgaacatcagaaggaacaaactctggacacaccacctttaagaactgtaacgctcaccacgagggtctgtggtttcattcttgaagtcagtcagaaaaagaacccaccagttccggaaacagtgctattgttttgtgtacattaattttgtattctgaaagtttactgaattaatttgtcagtattaggagctttatggagaagtayttagggttttctagatatatgatcatgtyatcagcaaacagtgatagtatgacttcctctttactgatttggatgccctttctttctttttgttgtctgcttgctctggctaggacttccagtactatgttgaacaggactggtgtgactgggcatccttgtcttgttccagttctcagagggaatgctttcagcttttctctattcagtgtaatgttggccatgcgtttgtcatagatggcttttattacattaagatatgccccttctatgcctgtgttgctgargttttaatcataaaggatgctgaagtttgggggctatagagcccccaagagagtatgtcctttgtcttcagctaccaggattggtagagaaagaccctcagttggggcagggttaggcatgtctgagctcaggctctccttgggcggagcttgctgtgtgtggctgctgtaggggatgggggtgtagttctcaggctgatggagttatgttcccagggatattatggctgactttactgcattatacaggccaccaggggagtggggaaaagccagcagtgacyggcctcgcccaactcccacacagcctgaaaggccagtctcactcccaccatgtctcccatgcagccagtgagtaggactaagaacttgccgcaggttacaagcctccctgctgaaaaagcaagtagggctttcaggtttcatacctcccacctgtcatggtttctgtgttcatatctgcactccctatttgccccctttcccaggttctgtccaggaaactgtattcggtttaaatttttacaaagttcagctggaacttttcttcttcctatggtctttctccagttacactggcagccctccccaaggatctctgcaagacaaagtcaggaatggtttccctggggactgcaagtgcccacagggctcgtcctgctgcttcctctacccctatattttgcttggctgtaaatttgcctcagctgcatgtgaggtcaaatccttctcccatgatctggaccttcaggttttccacagaggatgtgtgttcgggggtggacactccccatatcacactttgggcactcagttttttggctatctcacaaagcctacagcagcaagcctcttccttcaaagcgtctgtggattctctcggctttcctggtatgttcctgtggtagttcttggagcaaaagttcatgatgtgagtctccacatgcygctctgtccatctgaatgggagctgcaagttagtccttgcctcctattcactattttgggaactgatctgagtctttacatttaaagtgcctttcttgtaaacaacatacaggatgttgcttttttacacaatctaacaacttctgcattttaattacggcatttggttcatttacacttaatataattatcaatatgtttggatttaagtctactgtcttgacatgtgacttccatttgtgtctcagctccttgttcctctgtttctacttctttgccatttttgtgggtgaataaaataatttttagtattccattttatctcctctaatgacattttaagtatgtctatttatttttttaggttgcattagaaattaaaatatgcatttttttacatgatacatcttcaacttatcaagtcaatatccaaatatatccttcataaatgatttaaaactttatatatgtttaatttttaccatcctactcttagtgttcttcgtgtcatatgttttacttctacttgtttaaatatccaataatttaaaaatatttaactaatagtttttaagggagaagttacacatctaaaattaaaatataggttataaagtcattagaacccaaaatttagagggagaatttagagatcattttatttcatagatgaggacactgaggtccagagatattcacacattttcctaatatcacattgttaatcagaggaatggtcaggaagtgattaaagtaaagcaaaatatcatatactytaaaggtaaagatttctggtattaggttcttgggtccccaaagggttcatagaaggctttaggatgtgtcagtgctctgcaattgaggattcatatctttcatcaaaattccaaaaaagtctcctaaagttcaataactattttatgaagacaatgctgacaatatttttagaataaaaattmctttttttggtaagtagaaaaactccaagtcatggagaccctgaaaaaggagtgtatgtatgtgtatatttatctatctatagatatagatttatacacatacatccatatgcattcatatgtatatatccatatatatccacatacattcatatccatatacacatccgtatgtacatatatgtatatacatatgtgtatatgcatgtacatatacatatatatggatgtgtatatatatgtgtatgyaygtggatgcatgtagatagatatttatgtatatatccatatatatacacacacacacataatgcctataagcacataaacacaacaaatctgattgatcaattacttcatatcaagtatggcagacagctctggctagtttcctacctgtgaatcagagaaaactgattattcctttccttaggaacttaaggtactgacaatctgattgccaaaacaagctgtctaaagtgagacatagacaatgttcaaagcaacagtgtcctgaaggatcatagtccattctctgcattctctgtgtctgtatatgccagagagctggtttctttttttttttgagatggagtctcgctctgtcgcccaggctggtgcagtggcgcgatctcggctcactgcaagctccgcctcccgggttcatgccattctcctgcctmagcctcctgagtagctgggactacaggcgcccgccaacacgcccggctaattttttgtattttttagtagagacggtgtttcaccatgttagccagggagagctggtttctttaagagtctagctcctcgagcatccacagactcaatataaagtagaggaaggaagttccttcttaaaaaatgtatttcctcatttcaagtttagtaatgttttcttgtatgtatgtacagtggagcatagcagctcccagtgagataacaaagggcaggtacttttgccttccaagtaagtcttgccttttaaacctatcaggaaaaaaagaagttttatatatagagattgggattccagagtcatcttataaggagaaagtattttctaacatataatcaaaattccttccctttagtttagatcagctttgtccaatacaaatataatgcaagtcacatatgtaattataaatattctagttggctcattaaaaaaagtaaaaacaagtaaacgtaactttaatagtatattttaatattttgataacatatcaaaatgtcacttcaacatgcaatctgaataaaaattataaagttattttatattctttttttcacattaattcttggacgtyctgtttgtattttacatttatagcatagcttaatttgcaaactaagttttcatagaaaatatttgatctgtatttagatttcataaaatttacaggcaaaatagttgatttacatacttgttctaaaatactcaaaaatattttaatatattatacgtgattcataatatatgaatcmaatattagttttaaaatttaccacaagttaattaaaactaaataacattaaacttttggttcctcggtcatactaaccacatttcaagggctccgtagtcacatgtagctagttgctgctgcactgagcagtayggctctagtctgtagtagagatgagataaactgattgctgtcactcatcatattccgaacttgagaattgtaattgaattgcccctcaaactactcttccctctcctatgtacatccattccctttagtttatacaagagtaaacctatttgaggtactgtgaaattctcaaaacaaaactttatttatatttttctaaagagagaaaagtgaatgctttaaaatgatttatagaaatcactaaaaaaaaaatcaaactatcactccaaaatgctgaggataactgagatagttctttttttgagtactaaacaactgttacaacttcagaaacaaccaagcagatttttcaagcaaaaataattgcaaaatttccttccattgaggggaaaaaaacctctaaacacaatttaaagytttttacttgaatttcctagtctgaaaaggagcactttgatcaaactatagaaactgatacacattgaaataacatacagttgtgagtagtataaagtgaaggacccagcaggctaggataataaatggcaggtaaatcagatgactaaccaagagtaggaggaaggcgtggttcaatggggagaaaaaattcaacagaccatgccttcgggattgattttccctgtttatcttgttatgcctggctgttcattttggggtggtggggtcatggaattgatttttttaaatcaatctttttatttcttgagaaaactatgatgaaatgagatcagcttcacccagatgcagatttattagtgttatacccacatttaatagatggttcaatgagaggttaaattatttgcctgaagtcaaacatttaataattggctgagctggggttccatgcagttctatctgtttctgaagaatcccctacattgcaaattcattaattcccagtggggcctagtctcattcagaaatgagaatagtcatgtgggcatgcaggccatgccttcttggcatcacgtgaactgggttagatgtgaggtggttgctttaagaacaaggaatctgagtgagggttgttggatagactagaagggtgcccacacaggccagtgtcagagcagtgatgaactctgctcataacagagttattctgtgtgcctaggtactggagtcctcatggctaccacatttaagagctgtcattcctgtcaattctggataaatgcttggaaattcttgctctttgggtgtgtctttttttcaaatccctcaatgcaataggctttcctttttaaaggaacatgtacctgaatcctaacttgctgtctccatcatgatttattgcattggctggtcccaaagcccttctgcttcacatccgtaggctaacttcacatctataggctaatttattgcattgattggtcccaaagcccttctgcttcacctctayatatggcaaatttatacttcaggcattggtttttacgggtttcatttctggatgattaccttatttccaggtcctgtaagaaccttgcctcatgtctttcttatgctaatgcaagagttgtaggagcacrtagaataaaccaaagatgtaatctctgaactaatgaagtaatgagaatccaggttgtgcctttgttgtagagtattaccaaaatcacaagcattttttaaaaagctgcaacctatctaaacacccttgatattgcaatatcacattaataagaaaagcccccagagagcacagtgctcatgcctgtgatcccagcactttgggaagccgaggcagtcagatcacttgaggtcagaagttcaagaccagcctggccaacatgtgaaaccctgactcaactaaaaatacaaaaaattagccaggcttagtggtgtgtgcatataatcccagctacttgggagggtgaaacaggagagtatcttgaagctggaaggcagaggttgcagcraactgtgatcatgccactgcactccagcttgggcaacagagtgagactccatctcaaagaaacaaggaaagcccccagaaaatttactttaggtctactacttttaaaaatgtaaaataaaaacccaacttaatatgaaacaaaaaaagacaataatcgttagaaagtattttctttattttaatgtacacaaatgcgtacagatactcacaaacatatattctcatgactacttgcatggaccagcccttccaccactccagaaacacacactaattggtgttatgttttagyagcactggggataccaccatcacagaatttgcagcctggagtacttctgaaatttcccagaatgcactgatgtactatagtggtcggctgttctggatcaatggctttaggattatcacaactcaagaaataggtcagaaaaccagtgtctctgttttggaaccagccagatttaatcagttcacaattattcagacatcccttaagcccctgccaggtacagtatttcattcctgcttaccctactccactataccttcagttaaataaatgtttaggttgggatatttttttttcttaagaattaagttttaagaggagtaaggtttcagtaatttcaattggtttgcttgcagtgagtttaatcttaacccaaatttacagcctgaaaaagtcagaaaaagatgatttttttcaggatatgttaaagaaaagaaaaattttgtttcagttytaattattagtaattgctattgattttctatgatttctatattggtcaataatccccawttttttctcctatttcttttttttgtttcatcctgtagggaacttttcctttacccctaaggttattccagattctgttcaagagtcttcatttaggattgarggaaatgcttcaagttttcaaatcctgtggaatggtccccctgcggtagactggggtgtagttttctacagtgtagaatttagtgctcattctaaggtatggtgttggttctagtaactttcatttcccaaacagactgtaccatctgtgtcagccttgcccacactgacctgtatcatcttgacttagccaagcccatcttctttgtcattcccatagcatttggtcattaagattattccccagaagacttgtttgcagccagtctctgactgcttggtgctaactgctgtgctggatacactttaactggtctgtgtggcacaacacagaacttgccaaaattagcacttccaaaattgcaaattttgattttacatgtgaactaaagtttggagattttagataataaggaatgaaagattttataattctctccctgagaaaataatgttttctgtttatattttagttcttggctagtgaacaacactctttacctgtatttactgtggaaggactggaaccttatgccttatttaatctttctgtcactccttatacctactggggaaagggccccaaaacatctctgtcacttcgagcacctgaaacaggtacaggggttaaaatctgtcttttttcttaaaaaagcagaatctcacttttcatgatctggaatggatagttgatatttaaaaataactttcagttttatagatgtgtttagattcaataccctttcaatgactttttggagattagaatagcgtcattaacataaatatgcataatttattccaaaagaatatttcaaagatttcttaacagccatttcatttgattgtagtgatgtagaagatgcagatgcatatttcaggtaatttgcaaaatcctttataaggaaaatgggcatttaagggcagagacagttttcttggaaggcagactgttctcatagatgggaactcagaatcttctgtaggtgaataactgatatctaaatttaatgttttggggaaaagatattttaaaaaagatactagccatatcattacatgtgtgtatcaccttaaagtgtacaaaacacatttttatrtatcactcctttattaactatttactacatacctatcatgtgtcagaaacatcatttcatttgatcctcacagagctctgaggtgggtaggaaagtcttattatcttgattatgcaagaaagaaaatgaaagcctagtagttgcccaaataaaatagttactaagtggctgggctgggacttaatctggacttttcactacagtttcatcaaatctccattcagtcacttttacaaatgttggtaaatgatagtaatttatgtaaagctaatacaggatttggcaggtggtaagagcttaataaatatagatatccattctccattgcattttttactattaagattatttcaacaatatccatctacgaattacacaacaggaacatagtggggcctgggcaggttccggagcagttagcattggatccaggaatgttctgcttgagatttccttgggatatcagcttggttgaattgtcctgtggaaatggacttgactgcatccatcaggggatccagtgggagcaagagtcaacagcactctgctggatattggagaataagaaaggatgacaagatttggcctttgccttcaggaaatttacaatatagccaggaaattatccaaattgaccaatatttattaaccacttactgtatgccagttctrtactagatatgggaagatttaacaaggaataagaagagatgctttctctgatggagttcataaaacaggagggagayaaacacatgcacagcaaatgataatagatactagagagttatacctgagcagcagtggcatagagtgagtagacaagcctatgaaaccttcacctatatcaagctgcctyaggcatttttaagagagaaggtgcctttgggaaatggaaactttagtgcactctgaaagatggagcaagaagaggtatcccatgtgagaagagaagcctaatgtaagaaggcctggagattgaataatagtatgagygttaaacattaaatagcaatgtgattggaatgagggagggaatgaagaccttgtggaggagtcctaagagaggagagggccatccagagagaatgacttagaaatcaggcagagacatttctcttgattaaaggactgagagatactgaattgcttggtttggctctagaataaatgaatactcccaaaccttactcttggggtacgatcagcctcccctaaactttctgctttctaggaacttcagagtgacagggcctaggtctctgatttatgctgtgttttacaacctgaactggctgaaggctggtgggacttactgccatccatcctgatgatgacattttcaccttcactgaaatcactctgtcaggataaaagtgaatgttgcattttacggggagaaccagacagcttccatctacacaaggcacagacaagaaaggtgtgcttaagtggtagtaggaaggatttgagttgaacataaggaagtcttgcctgtcagtcagatgtgctgaaattatcaggatgggttcctgaagaaatctatggaatattctctcctgaagatctttaagaatgtaataaatatactgcaactgcctggaatgagaaatattgttaagttgtttacaatcttattataagtggtaaaagtcttatattctttatattcttatattcttttctgctctacctgtgcctctacttttcagttccatcagcaccagagaaccccagaatatttatattaccaagtggaaaatgctgcaacaagaatgaagttgtggtggaatttaggtggaacaaacctaagcatgaaaatgrggtgttaacaaaatttgaaattttctacaatatatccaatcaaagtattacaaacaaaacatgtgaagactggattgctgtcaatgtcactccctyagtgatgtcttttcaacttgaaggcatgagtcccagatgctttattgccttccaggtatgagagagaaaacagaagatatgagagtcttaatagcggcattgtggggagagggaaagactatgtttctgggatatgttacagtgtaaatggcacacatacctagattttgattggccactatagttttttaaaattatgtgagaaaattaatggaggtaattcagataagagtgactaaagtaaactgttaaagaaatggaaagtggaccttttgaggattaatatgcaggaattcgtttttattccattaaagaygaytgcagttaaaaaaaaaagtttaaacagaagaataattaaaggactaggttaagaattctgccaccctgtcaataatttaggtatactgtgatcaaagaggtcaagtgggcagcaaaagtagagaggcaagaggggattgcttgggtgaaggacactttcacaactttctcacattcagggaactttgcaaattcagagtaagtcattctttttctttttgcttttcttttgaagctgtatcatgattttaatttctgtatgttacacattactgatttgttttacattttttattgatatatattatagttgtacatacatttggggtacatgtgttattttgataaaccattatttttcaataaaatcactataggccttgcaccactgtaggtatttttgtattcattatctcatttgatcctcatactataaagaaaaagttaagtcgttgagagtatcagtcaattaccaaagctgcgtggctggaaagcactgtgctgtaatgctttccaccatttctttttggggaaaataacatcttggggagtgttttggagatttgagttgtgtagggatttgtttttcttttcataaaattctaatttaataattattttgataatttgttgtctacatatactaatcaaataagttatacatgaaagttaaagatagtacacgttcctatttggtaaaaattaggagtgttttggtaaaataatattcrggttaagtgtgtctatatatagaatatatagtatttatatagaatatataatataaatatgtatatagatatatagtttcaaattttggtcaccatggaaccatgcaaagtgatatgcatggatatgtatgagtttcatttaacacagttttgtacaaaagtaaacactactatatatatatatatgcaccattataaatcatacagatagtaatatataaaatacagtaaaatatgtttaatactaaaagtataataaaaataatacaatgttttgttgataaagtacttggggctttatattttgagtccaccattatagatgtcaattttctttgcaggctactgtacatatgcaaggtttggaaatggaaataatttattacataatagaaaatatctaagaaaaaaaataaactttactgttagaatgtggcatggcccaatgggaaaaaatgtatgtagacctcagaagacttggttctgatgccagtttctacatacgtcattgtgcatgagttacttacctttattagtatcctggtccagtttctactcttagtagttgtgaagatcaaaagagacaatgtatgtgaaactggtttgaaatgcacaatcattttcaaatgtaagatttaattatttttaaaagttactctttctaaaaagtctggaaatttagttttttgaagcttctagttgttgaattcaagaaaaatggaagtttatcataatttgtacagttttatttctgttaaatgttctatgtaacttaattttgaaaataatgaccttactttatttaaaartattcaattgatatatatatattcaagctgtacaacatgacttaataaatgtatacattgtgtaattatcacaattgaattaattagacattcatcaccatccatgctgtacattaaatccccagacatttttagaaattcattttttagcaagagagatttgttccaattcttgcacttttctagattaaaaaatctgtcaacataaatatagagcaatattttttctcttggtgatttatattgctgtatattaatgtcaataactatttgaaactattaatattgtgtatcaggagtatgaaatgaaacatttagtaatctctcagtctcagaacttaattgttgccacggagaacactactgaatgcaatttttgtttccttttctttaggttagggcctttacatctaaggggccaggaccatatgctgacgttgtaaagtctacaacatcaggtatttgttttctaaaatctgtgcaaataataatttagaggcgtgtgtgtgtgtgtgtgtgtgtgtgtgtktcccattggtgtctttagggatatgaacactgtctctttgctaaagtttaggtcaaaaacatgtttttgaccccaacacaccaccaaaatatgtttaaataaacctaggggtagagagcctacaaggttatcactgagaaagatctattagaggaaccaaagggagcccatggacttcaaaactgccagatattaaatcgagactttgctaagctaaagtcagttttctcatgcatattatctacatgtttttttgctttcagaaatcaacccatttcctcacctcataactcttcttggtaacaagatagtttttttagatatggatcaaaatcaagttgtgtggacrttttcagcagaaagagttatcagtgccgtttgctacacagctgataatgagatgggatattatgctgaaggggactcactctttcttctgcactwgcacaatcgctctagctctgaggtatttcactatgtaattcttccgaaataaaggaagtgaagtatttgcatatgacactactttgtagttaaaatgactggaaaacggtttagtcattaagattagaatgaaaaggacagatattgtataattatttagccacaaatgaatacagactacattttgggcaaatgtcattcaacactcagttagcaaatagttattgggtttaggatgctgtgttagagcctgggatattatgggtgaaagtttataggctttgctcttaataaacccagtctagtattagtccaacactaggaaggcagtattgcctagtgattaagaaggtgagttttggaatttgactacctagaatgcaatttgggctctactacttactagatttgtgaccactggcaagttatttaacctctgtggttaagtaatacctcatcatagggttcccatgaagattaaatgagataatccatgtaatgcacttagcacaatgcctggcatgtggtaggcattcactaaatgttaactgatagtgaagacagactaggataactgttgtgctgagagcaggatgtggtggaatcacagagaatgaacacgtagtctaggttggcttggtggtggtagaatggaaaaacatcttggaaacaaagatgagacaggtgaaggctgagggggtacaaagacaggaaaacaaagagccatagagtgtttggatgagagtggagtgaaaggaaggtgggaaatctggagaggtgggagcctgagcataatgggcctcctttactgtgctaaggagacaggtgtcattctagaagccaacagcaagccagtaaagatatttagtgggtcattaacatggtcaagttgtgttttagaaaggcctgtctgttagcagtgtgaatagtgacttagagagggttaagtctgagacaattaggaggctgtcacagaaatccaggtagaaaatgttatgggcctgagtgaggggatgagcatgaggtgagaaaggagatgacaaactggacatttaaaatgggactagttcaagctgcrcacagtgattcacacctgtaatcccaacactgtaggaggccaaggcaggtggatcactggatgccgggaattcgataccagcctggccaacatggtgaaaccctgtctctactaaaaatataaaaattagctggacgtggtggtgcgcacctgtagtctcagccacttgggaggctgaggcaggagaatcgtttgaacccaggaggcgaaggtttcagtgaaccaagatcatgccactgcactccagcctgggttaccgccagactccatctccaaaaaaaaaagggactagtttactatgggtagtaatgagaagaagtcaaggaggaccatatttgtcaggattagctccttgggtggtgttggaaatccataaaaatataaaatgcaggagaaaaagaggttttggggtgggtgatgaagtctgttttctgggataattcatatggaaatgttcagtaggcagtttgatatttgaatcagtgactcattaaagatcttgtctgaagatataaatttgtagcactggtttgtagattgcagttaaagccatgatagttaaaatcatttaggaaaaatgtgagaacagtgcccatgttacaatggtataccgtccagattgctgaggtttgggattacaaatgagaagtgcagtaaacaaatgatrtgggtgaatatagaaaagtcttcaaataaaaaaataaccactctcttcttggctgtgttctctayctgttgttaagcttttccaagattcactggtttttgatatcacagttattacaattgactggatttcaaggcacctctactttgcactgaaagaatcacaaaatggaatgcaagtatttgatgttgatcttgaacacaaggtgaaatatcccagagaggtgaagattcacaataggaattcaacaataatttctttttctgtatatcctcttttaaggtatgtaaatgcaagtatttttttatattgtgatgaaatagatatagacatatttaatgtaatgtctttggtttaatagtagaagacaattatggaaaaataagatgcttagggctcttggccmactatattatagtaagtagttcttcatataaattaggaggcacaactacaaatatgtaaacttaatgcatactgacaatttgactaacaaagttaggctaattacctaaaaggaaacaatagcagatttttatactagtgaatgcaataacatcatcagttggcaagtacaagaagtggattgagacagtggcaagaggtgagcaggaacagatgggcagcatgccttgcacagtaaaagttattctgtgctcatccatcttagtttaactaatatcctcataaggtgagctttaaagtttccttttagcacctaagtagcaatttcgcaggctggaaagatggatttctgtttgggccataagcatggggataggctatttggaaactagatcattaactagtattaagaagcagaaacaaacatgagaggaggggaatagagatggacattgatgaaaattagcaaatatattttatatttcagttattaagtgggccttttaatatagcacctaaggtcattatattccaagactttagttgtaaacacatctattgagaaatcattggaaatgctacaagttagacttcttgtgacttcttccatctcagaaaaaggttattgaaaacttgaccatgttctctccaaaggctccatttgtccctcacagtcattagcaatagttgctctgcattagaaaccaatatttgaaatgatgtattttactcattaagttggggggacttttttttcctcyatagtcgcttgtattggacagaagtttccaattttggctaccagatgttctactacagtattatcagtcacaccttgcaccgaattctgcaacccacagctacaaaccaacaaaacaaaaggaatcaatgttcttgtaatgtgactgaatttgagttaagtggagcaatggctattgatacctctaacctagagaaaccattgatatactttgccaaagcacaagagatctgggcaatggatctggaaggctgtcagtgttggagagttatcacagtacctgctatgctcggtaagatgctgatgtatgtgcacagatatttgttaataagagcagccccttcaactgcatttacaaagggcttgcattccgcgtatactcaaatatacacatgatatttgctctgtaccatgccaagtgttcttgcagaattcaaatcaagttgtttccaggaaaattgtatgtaggcattcacataattttctaaatctgtgttttaaaaaattgtaattaacaatagagctacaatttaatgagcttaactgtatattcttagcatgtactaaatgcattattttatttaatcttcataatacctcagtgcagtaggtactaatatcctcattttacagatgaggaaactgaggctgagaaaagtaaggtaacttttcccaagggccacagttagttagaaggagttgaaactgggtctaactacaacatgcatgatcttcccactatcctaaattatttccactttgatgatcccatagattccactttcaacatgaattggtcaatacctgagtctatttgttgaaattcagatgcttgtagaataaatattcgaaagtcgagtacaatttggaagtctcctaattaggagtaattcaacagaaaaaaatatatactctaaataccccatatactcttaaaattacttttcattgcccagtgtggtaatcactagccacatgtggttatttaagtttaaattaattgaaattaaggccaggtgcagtggctcatgcctgtaatcccagcactttggaaggccgaggtgggtagatcacttgaggtcaggagttcaagaccagcctggccaacatggtgaagccctgtttctactaaaaatacaaaaattarctgggcacagtggtgcatgcctgtaatcccagctactcaggaggctgagacaggaagactcacttgaacccaggaggtggaggttgcagtgagccaaggtggtgccactgtactccagcctgggtgacagagtaagactgtctcaaaaaaaaaaaaactaaaattaaataaaattaaacattttaatctcgcagtcacactagctaaacttcaagtgctcaaaagccacaaatagctaatggccactgtattggacaatgtaggtataaaacgttttcatcatcactgaaatctattggtcactgctggattatacagtaaagttttgaaattgcaaatatgtgtgtatgtgttataattgtatataggttttgttgacatgtcaaccaaggccttttagaagcaattcctatgtttagaggccttttagaaacaaggccttttagaaacaattcctatcattaagtagatttaatgatagaggtaatgttttgaatgattcctccttagttatattacttgtttctgttaaacctgtgacaaagaccttttctttgatcaaaatgtggttatgctcctctgagtcctcttcttgactaggcctcarccttggtcttcatgtgtccatccttgctgagttcagttttagcaagaatcctacaaagtcagtttaggagaaccccctaccactgatacctgatcaagttcttcatctcccacccttgatggacattggtctgatttaagtaagaatcctgtttaggctcttggcctgcctttagcaagaatcccattaggctaatttaataaggattgctctatcctggatgctgtccctgtatttttccacccaatgacttcctcactcagtttcttggctataaaaaccccaactgtctttgctatgttgcaatatttgtctttcctagtgcgctattgcacttatcttgactaaagtctttcttaccattttaacaagtgtcagaataatttttttctttaatatttgatacacaagacacaagaattacctagtagaccattatatatgtataaaactggtcagtttttcataaacctgtaattaaaatcctaaaattagaaaattagaaagattttagggatcatttagatgttatgatgttgcaagaaattttttctttaaaaatagtcatgcttaaacaactgtttctttaaaaaaccctgctacttcataaggaagtctgtttaagcttttggacaattatgaatattagtttttttcttatatttagcctgtcttctcttcatttctcccgttcattagtcttagttcttacctctaaatttacaaagaataatttaatcactttccacatgatagccattcaactatgtagagataactgttgtagctcattgtaagcactttttttttttttgagacagggtctcactctgttgcccaggctggagtgcagtggtgcaatcatggttcactgcagcctccatctcccaggctcaggtgatcatcttgcctcagtctcccaagtagctgggactacaggtgcacactaccatgcctcactaattttagtattttttttgtagagacagggtattgctatgctgcccagtctagtcttgaattcctgggctcaagcaatctgcctgccttgacctcccaaagtgctgggattacaggcgtgagccaccatgctggaatcaagcattttctttggaggaaaaattcaagtatcttcaattgctccccaggcaatgtggcatctaaatctttgtcctagtcgccctcccgtgatttcattccagctagttaatattctcttaaatattgcccccataaagacactgcactctcaatgtgttcttgtcagtgaagggagactctaactatgaaggtcttctttttgttgtagccaaaagtggaatcagatctttaggatgcctgccattgaaagaccatagtcttttccacattcattattattaagccagatccctttcattcgttcatttacagaattgatatgaaacttaaatttaggattttacatttgttcgtatcaaatttgaatcaatttcctgattctgttatgatatttttgaatttcaaggctgtaactgaacctgctagtgatggtgataatcatttattatctgcaaagttgataaatatgtttactatgcattcattccaaaccactgataaaaatattgagaaatgcactgagccctatgcctatcatttaatatttccctcaggttggcattatttgattttgagtcacataggtgggttttaaatcctgggtctgccctttggtggccttgagcagattatttaactcctttaaacttcagtttgcctttccacaaaatgaggttagtaataatagtagttacctgattggyttgatatggtgcyaaaatgagagaacatctctaaaacccttagtcaaatgacataaaataaaggtattttttaatgttgaaataatagattcaaaatttagcaattataatatagaaaaaatttcatacatttttagagtaaaaaatgtaagatattaattttgttctttatattccttatgtttttaacagcaggaaaaacccttgttagcttaactgtggatggagatcttatatactggatcatcacagcaaaggacagcacacagatttatcaggcaaagaaaggaaatggggccatcgtttcccaggtgaaggccctaaggagtaggcatatcttggcttacagttcagttatgcagccttttccaggtaataaagtcacattcgtaatcagcttgttctcccaatttagggtcagaaaaatctcataacatytccttctccaaggctgtccctttagcccctttgttgtgctctcatccttgctccaaactctgctagtcttctgtgtgcactgtgattgctgtttgccctggatcacaaattacttctatgtgtaaacacagctcagggtgtggtgggcaactttagacatgggaaacctgcgtcctgttgttctctctgcctggcctctttctcttctcagtcccataatttctcttctttctcttatttctcctttgctgatattttaggcctcccagtggtgtcaaaaagcattgcatacaaccttgttttcaaggtaacaggtcatacttctgttactatgcagtatgcagtattaggtatcaaatcactaagtattaatatatactattataatatgtagtaccatttaacatgagtaagcctgtgctaccatttttattaagtttttatctttttwaaaaaaaatgtcactgatgaagtttttagtgttatgcccctcatcctacttttcccataaactgtgaattttattgtgtgatttgtacagtgcaatgattcctagaaaggcatgtatcatgttatagcagaactgactatatattttctactgacagtcataataaaacattgttgaaatctaaaaaccatacaaacaaaaacaaaaacagtattgccaaaaaaattagcccagcgtagtggcaggtgcctgtagtcccagctactcgggaggctgaggcaggagaatggattgaacctgggaggcggagcttgcagtgagcccagattgcgccactgcwctccagcctgggcgactgagcgagactcgtctgaaaacaaaaacaaaaacagaattgcatggcctcattggtattttgtcaaagccgtctttgccactaaggtgcaaatatcattctaaattaactataactctcctctggagagggacagatatgaatgacataaactctctttgtttaaatgttttcagttataaaatatgtaaattgaaaaatgttaaaatttataaataaagcctactttgtatttttgtaaaataatttatttttcactttgagaaatttaagagattttaaaagttcatgtggcttctggtttctggcccagaagcttagaaattgccactccacccaaaaacaagtaaaagtctgagcaaactgaaaacttaacagctcttcttggatccacaagagaagtgaggtcacagagcaaactgctgtccccagttggaaagacagattggtaaatacagagaattacaatttaccagagcaaaaacccatgagctgaaatctttttagaaagcagtgttagtggtagaaaaatccaaactgtaattgatgaattgcttgaggctcagtgtgggtaactctgagagttagaaactcgaggggcatcctgtcataggagggcttcattttataagttttacctccaggagctttaactggtttttttcttagagaatctccttgtgcttcccacagagagaagggaaaaggaaaaattttgaaaggcaccagagcattctgttcttcttaacaagggctgcattcaagatacactaatcacagctggacctgctcgggttttatcagagcttaattgacctgggtaaagagaagtgcccaaccccagcccactccagccgtcgtgtcccacctaagtggggtggggggactgaaaagaacctgtgaagttcacagtcgaaaagcaaagcaaaaacccacttgaagttaactgagatctaatctaagactataaaatgcctccccttcccctacaccttaccaccgcattactaaaggcccatttacagcagttgctttcacccagtacagcatattcagctatcaagaaaaaattacaaggcatactaaaaggcataaaacacagattgaagagatagaggaactatcacaatcatttaaatatggcagggatgttagaattatcagactgagaatttaaaacaactatrattaatatgctaggggctctaatggataaagtagtcagtatacaagaacagatggtcaatgtgagcaaagatatggatatttgaggaaaaaaaagaaatgttagagataaaaacactgtaacatgtgaggartgtttgatgggcttaatagtagactggatgtggctgaggaaggaatctctgagcttgaaaatatctcagtagaaacctgcaaaactataaaggtaaaaaaaaaaaaaaaaaggaaaaaaaccgaaacagaatattcaagaactgtggggaaactacacaaggtgtaagataggtataatatgaatactagaaaaagaagagagaaaggaacagaagaaatatttggargaaatatttgaaaaataatgactgataatttccccaaattaatgtcagataccaaactacaggtatgggaagctcaaagaataccaagaaggataaatgccaaaatctacactaggcctatcatattcaaactgcagaaaaccaaagataaagaaaaaaaattctgaaagaagccagaggaaaaaatacttaacctatagaggaacaaagataagaattatatccaacttctcctcagaaactatataagcaagaagagagaaaagtaaaatatttaaaatgttgagagaaaaaaacactaacctagaattccataccctgtgaaattatccttcaaaagagaaggagcaataaagacattctcagacaaaaattgagagaatttgttatcagtagacctgctttggaagaaatgttaaaagaagttctttagaaagaagaaaaatgatatagatcagaaatgcagatctacataaagaaaggaagagcattagagaataaataagtgaaagtaaagtaaaagtttttctttttcttaactgacctaatggataatagtttgttcaaaatagtaatagcaataacatattcaattatatccacttatgtatgtatgtgtgcatatatatatgtgtatatttatatttatattaagcaaaatgaatcacagcagtgacacaagggatagaaaagaggacttgggagtattttgttattataaggtactgcaaacctgtgaagtggtatagtgttgtttgaaggtggacttggattagttgtaaatatacattgcaaattcaagggcaaatcactgaaaaatatttttagaaaagtataactgattcccaagaaaggagagwaaatagaatcatttagaatgctcaaataaaaccacaaaagtcagaaaaaaagtggaagacaaaagtaggaacaaagaacaagggcaacaaatgaaaaataataacaaatatggtagatcttaatttaactatattagtagtcactttgaacatcagtggtctaaatacaccaactaaaagacagaagttgtttgagtggatcaacaaacagactcaactatacattgtctataagaaacccactttaaatataaagacacatcatatagatcaaaagtaaagggatggagatagtatatcatgctatcgctaatcaaatgaaagaagaaacaatttcagacagcagacttcagagcaaggaaagttataagggataaagagggacattacataatgataaagggatcagttctccaagaagatgtaataatccttaatgcatatatctctaacaacagagcatcaaaatacatgaggcaacaactgatagaactgcaagaaacagatgaagccactatcaccattgaagacttcacgacatctatcagaaatgggcaaatccagcagaaaaaaaatcactaaggatatactgatgaactcaataacaccatcaattaattggctgtaatggacatctatctactattaataatttttccaacaacagcagaataaacattcttctcaagctcacatggaacattcaccaagacagaacataaaatacacttcaacaaatttaaaagaatagaaatcatacaatatctgtcctcagactacaatgccatttaactagaactcaataactgaaagatagctggaaaatctcagaacacttggagattaaacaacgtatttctaaataacaaatgggtaaaagaagaaatctcaaattaaaaatattttgaactaaaaatgaaaacaaaacatcaaaacttacgggaatcagtaaaatcagtgcttagagggaagtttacagcactgactgcatgtattaaaaaaatagatctaaaattatttaagcttttactttaggaaactagaaaaagaagagtaaattaagtcccaaataataataagaaacaaaactaaaacaaaagaaaaaataaaaaggaagtatagtagaaatcaatgaaattgaaacaggaaatcaatagagaaaaatcaatgaagccaaaaactggttctttgaaaagataaataaaattgataagcctctagccaggctaagaaaaaaagagagtggatgcaaattgctaatagtagaaatgaaggcggggacatctctgtagaacccatggagattaaaaggataatcaaggaatactattaacaactctatgctcacaaatttaataacctagatgaaatggaccaaytcttttaaagacacaatatgccaaaactcacagaagaagaaatagacaatctgaatatgtccacatctattaaataagtggaatcaataattaatagccttctgaaatagaaagcacctgggccagatggattcaatgatgcattctatcaaacatttatgggaaaattataccatctctacaatgtctttcagaaaattgaaccagagggcctacttccaattaggccaatgaatgagtttattctaggccagaattaccctaaaaccaaaactagacaaatatattacaagaaaagaaaattttagaccrgtgtctctcttgaatattgcaagaattgcaaaagtcctgaacaaaatattagcaaatcaaatcgagcaatatattaaaatagttttatatcacagtcaagtgggatttatcccagctatgcaagtttgagtcaacatttgaaaatcaattaatgtagtccactatatcaacagactaaagaggaaaaatcaggyggtcacattgatagatgcagaaaatgcttttgacaaaattcaacacggattcaggatgaaaaatcctcagcaaactaagaataggggtaacttccttgagaaagaacatgtataaaaaaacttgttgttaacatcattacttaatagtgagaaattagaggctttctcactaaatcagaaacarggtaaggatgttccctctcccaatttcttttcaacactgcagtggaagtcacagcatgcaacaatacaagaaaaggtatacaatacaagaaaaggtatactgattgggaatgaagaaataacgctgtctttgttcacagatgacatgatcatctatgtagaaaatctgaaagaattgacaaaaagactcctggaactcataagtgattatagcaagtttgcaggacacgaggttaatatactaaactcaatcactttcctgtataccagcaatggacaagtggaattagaaattaaacacacagtatcatttacattaacacccacagaaaatgaaatacttaggtataaatctaacagcatatgcacaaaaatctatatgagaaaaactataaaaccctgatgaaagaaatcaaagtgctaaataagtatagagatattccatgtcatagataggaagactcaatattgtcaagatgtcatttcttctcaacttatctatagattcaataaaatcccaatgaaaatcccagctaaarttattttgtagatattaacaaactgattctaaagtttatatggagaggcaaaagacctagaataggtagctatcacagtattgaaggagaagaacaaagttggggaaggctgatatcaactatatgacattctgggaaagtaaaaaactatgtagacagtaataagatcactagttgcgagaaggctgggggaagaagtggcgaatagacagagcagagaggactttgaaggcagtggaactattctatgtgatactataatggtggatacagctcattacacatttgtccaaacccgtaaaatgtacaatacaaaactgaactctaatgtaaactatagactttgggtaataatgatgtcattgtrggctcattgattgtaacaaatgtactactttggtaggggtattgataatgggggaaagttatgcatgtgtggagaaaaggagtatctgggaaatcttggtacattcctctcaattttgctgtgaatctaaaactgactaaaaaataaagtcttaccaaaaaaaaaagacgtccatgcagtatctgaagttgaacgacacacacacatatcctcctcccagccacatacacaaacacgctccaaaatgaagtcccaagagtggcatgagttttttttttaaactggaactcattaagagtatgattaatactcattattttctttaaaaaatggagtctattttatgttgctagtttctaggtacattattaagaatactttacctccatctgctggaaattttaagcaattacaagttatcttggtcctttttttctgaaggtattcaattatcttcaaaatgtatgggataaaaaaaaaaatgtaagggaaaaacctgtctttctgtcctgaataatgtttctgacacttcaacatgtcatattatatcaattaaataaaagaacgacaaaattaccaatgacttttgaattagataattgctctgattgctcacatgtgtatcccattctctgttcagatcagaaatcagtacaaactgaatatattggataaatattggttgaactgragagtggttcatcttgtaactttagtaaggttatccatctctaaacccccatactttccaaatgtcctcaaacttaggttcacagtgcccttgacactgttgttggagattttcgatgtacttctaattttaaacattttttcctgcattttggaattcatatttggaattcccagaccagaccagcattattttctctaacttttcattttagtctcagtaatgatgatagtaatagctaacatttatttaatgttcttaccatgtgctagggatagagtgatatataaatatctgtaaagcaggccattgtctctgtttacagaagagctggagtaaccttcccaagacaaaaaagttagcaagtgaaggagctggcttcatcaagtttttgtcacttagacatttaccccctaattttcttacttgctgaatgcaaaggttgtattttatatgtggctaatatgaattcataaggatcgacaacacatactaaatacctaatatatgtcaggcaccctcctggggctctggtggaacaaagataattcaagcacagtctcagccaaagatagttacattctagtgctagatgaagaaaagaaagcagcaaaagaaaaccaaaaccaaaatcacatgtggctagtgcactggtagaagaacacgtgaagtggagtgaggacagagaggagatgtccttcacctggaataggaaggcagaaagggcttcccaggaaaaatgatgcatgaattgaggcttaagtaaggttaggcagatggggaagatcattccaamctgaagagactacctatgtgaagggttggaggggtagaagtcctgcagtgtgtagatagtgtactgtrgttagagtgaaggatggctttgcatagcagagactggatatgcgggcaggagccagattgcacagtgccacgcacaatgagttaaagagttggctaactggtgtaagattgttagatttcatattaaaatcatatttggagttatttgcatattatgtaattatgctacatttttaggtgatgttttacataaagactgagagtgaataggtcaagaagttgtgttcagctgcaagtgacagatctgcgatttttcgaggcttaagcctgcggtatggttgcgctactgcactggtctagaacagaccatttccattgtagtctctgtgactggggctccctggagttgtgcagcgtgcaaggtgtttggttgtaagcggtggccagggagctccacaatgccatcaatcacctggacttgatctttccccaaacatccttagtgagtcctttattcaattctcacaagatggctgccgcccctcttgcatagtgtccgcctcctgggttgggggagggtgaaggacagaggtgcgccacagtgataagcacatctgactaaccagaccgtgtcacatgattgtctgggctgcaatcaaacttcagaaacagtttttcctcccagcatactgccctgaacaatatcagatatatatgaacttgaagaaaaggagaggacattgggtagactgtagcagtacatactacacatactacacacagtatcaagctgcagccatttttgtttcttcaaagagaatattatttcaaatcattttcatatttatgttttcaagcaaaagttatgtatgctctacaaatttctttctaagctttgatattattcttgttaaaaatctgcttttcctctcatatatatagtatagatatttaatcttttggtttcttcttattttagataaagcgtttctgtctctagcttcagacactgtggaaccaactatacttaatgccactaacactagcctcacaatcagattacctctggccaagacaaacctcacatggtatggcatcaccagccctactccaacatacctggtttattatgcagaagttaatgacaggaaaaacagctctgacttgaaatatrgaattctggtaagattggaactagtggtctttgtcttttcacaagatgttcttttttgatataaaattatgagccatrgtaaagtatttcctatatgttctgaaatggactagtacgcaacttttttacagctaatgattcatcaaaacatattgtgttctagttttcttgactgggagtaagttaagcttcaaggaagtatatcaactcttgcccattgatggattgccatggtaaccgttttctgagtgtccagaaagaattgggtttattcccctccctgattatctaattatcctcagagagaatgatagagaattatttttgcagcctatggagcagactgaagattgaagagtaagaaatgaactggacggaaagaacattgccttatacctcttctccacagcatttatctaatataaaaattgtacattatattttgtcttttgtttcctatgtgcagagaaatatactgctatgcagatactgtttttagtcatcattgtatgcctagcacctagcacagttagtggcactgtgtaggcattcactaactatttcttgaatgaattggcactattcattcaatcattgaaatgatgaaatgtattcattagtatttcagttgtcttagtgatggaatcacatatatccaatattttgctttgtgcttggctttatttagcctgttcaaaaggtgaaattgactaactgttggatgttaaacactatatgttttcccataaagtgtatgtgatttttcattccttccttaattttgtctaattaaccctttttacacatttctaaaataagtaatttcagatagatcatttggctggccaagattggacttggcagcactggtcatgtctgttattaaatttaatctatcttattgtcttctcattgattaacagtggtctaagacagtggttctcaaccttggcggcacatcgaagctttaaaaaaaaaaaacaaaacactctgcatctaggcttcaccccagataactcaatcagaatctctggcaatagaacccaggcatagtagtttcttaaaacttcccagatgatagcaaagtataaacaaagttgagaaccattggtctaaggaaagtctttttactctcttaaactttatttctaagagtgattagatactataaaaatattttattgtattcacatatgtgtcacatgttttctaccatcttgctgaatttctaatacaatgttaatgaaatagtgtcctcttctaggaatttaacttcccatgtgaaacaatttatgccacaaaaccaactgaaggctaccaatcatttggtatttattcttggaaacattgaacaactcaggtctgggtagattggacagtggtattaccattaataatccagaatttaaaataaattaatttttttgagcctttaactttgttctctctttgattaaataatttctaccaatttgtataaaatgttaaaaataagatgttgatttttaaaaaatcaattacaggaatttcaggacagtatagctcttattgaagatttacaaccattttcaacatacatgatacagatagctgtaaaaaattattattcagatcctttggaacatttaccaccaggaaaagagatttggggaaaaactaaaaatggaggtaagttatgggcttgttgtgggtttctcaagcagaatattgtgatatatgtgctgtgtatgtygatgtttattttttaaaatctgaatgcgaagtaattttartaagcttttttaagtttaataagaaaaatgtgtttgtagaaaactttgacctgacscttactctaacccctgaagctaactaataatattctatyaaaatagaaagcaactaggaggtaaaacattgaaatcaatattgtttgaccaagaaacacattatttggtctcaccacacagtgtcactttttccagatactcataggtttctgtacatgtggtgagctatagaaaaaccaagctttttttctatgtgaattttactgaggcctgagctgtaaagttatgcaacagtatagccttaaagaaaataggtctgaaaaggttttctaagagctgatgaggtggtgattattatgaggtgatgacgtttatttcagatgtctctgatgatattcacaaaactcacccaaattgggttattccccgttggccatatccttgagctggagtcagagaatgatttggtcactgggcaaaaataagtgggagccttttaggcagtctgttaacctacrattatagaagaggctgacttkctttctggacatgtgttatttattctgctcataccacatgattactcttcaacccaaactccattacttctttccatctttcagtgctattgcagcatcctttatcattccttgctatttatttcagtaccagaggcagtgcagctcattaatacaactgtgcggtcagacaccagcctcattatatcttggagagaatctcacaagccaaatggacctaaagaatcagtccgttatcagytggcaatctcacacctggccctaattcctgaaactcctctaagacaaagtgaatttccaaatggaaggctcactctccttgttactagactgtctggtggaaatatttatgtgttaaaggtacagtgagyttactaggcactctttattgtcattctcaagtgcaaggctctcaaaaggttaagcaattgttcttttttaccaaaaggttcttgcctgccactctgaggaaatgtggtgtacagagagtcatcctgtcactgtggaaatgtttaacacaccagagaaaccttattccttggttccagagaacactagtttgcaatttaattggaaggctccattgaatgttaacctcatcagattttgggttgagctacagaaggtagacttttaatgcaagtctttattttatgatatagaataaattggaaagggctttttcatgcatctagaacatgctcatgtataaataaamaatatatttgacaactttcattgatttatgtttggcatgcagaagcagtgagttatccagactaatttctggtgggaagaattctcagggagattaatttgcttttaaaaggctttatgtaaaagggtataagttatagtgtactaattttataatattttacttagtttagatgttagcatggttctctggtttaaagtccatagtaacttggtgttttccatgaaaaaaaaatgaaaaagaactgaagaaagaaaaaaccaaaaccttgtttagaaatgttctttcatcattttaagggctgtgcagtaacaagagagaagtaaaccataaaaccagcttattctaaagtagttttgttgttggcttgcaaactttaaatgattcctcatccaaaacttttcacgctttaaccaataaggaagcacccactgaattttaagtcatcaattaacctgattaattcattgatggggaaagcctacattgacttttatggtgataaactcaaaattgattattaattttttataattgctacttgttattttaactattatatatgtgcatgtgcatgtttgtatatttctgggcctatgtatgtgtacgtgtttttaaagattaattagaaatgttttgttcagtggtaactcraaagcaaatcagtataatcatggcctcactacttcttaaaatgcagttattccccaggatgtttaaaattattatgtaaggtatttttgtgatcttatactttatagataaaaactatgaaaactgyggaacaacactgaatattgagttgataaactcaaagaccatagtttcattggactttttctgttgagcatgtttctgatratttgttgtctatttaaaaaattgccaccttataaaaatgcagttaaattggagaaattggaggagtgccttttaaaatracatctattttagtaaacttaatgcagttcagtctaaaaccaagaggaaggatgtaaagttcatttccaagattatcaaagaaatgaaatgggaaaagacttcagagataattgacaccctagcctctcattttattgatcagaaatggagatctagacagatgccagatgtcaccaggcagagaaaaaccccagggctgacttctccctacagcagtcctattagggtgctgtccgtggaaggaataggagtcattaagtcatccatcccactctttcaagtttggggagaaggacagcagacagagatctcctggttgaattctcatgactttcatgcagtgctttttgtttctaaacttcctctgttttcacatttgctcaacacaggttccaggcagaccatttagaaaatcatgaagctgcaaatacaagatagagtcatttgtacatgagtggccatctacaaatactaactatgagtacagtaaaagtctgtggttctgcaagggttgatgagtgctatatagtcagaaagtgctgtctcttttgaacaacttgagcctatctcacaatgacaggacagctggaaataataccgtaactgcatactgaaactctgaggagtgggcaataaaagagaatatttgtctctttaattagtaatgttttagaaaggaaacaggaagaaaatgataaactttgtctctgtcatttctgtcaaaatttccttatctgaaaaatgagggaactagagcacaagatgaagtttcgatctagatcaggggtgtccaatcttttgtcttccctgggccatactgaaacaactgtcttgggccacatgtaaaatatactaacattaacgatagctgatgagctaaacaaaattccctaaaaaaattcataatgtttaaagaaagtttacgaatttgggttgggctacattcaaagtcgtcctgggccacatgtggcccacaagctgaaagttggacaagcttgatctagatcttaaattctatataatacaagaaactcacaacagtgtatagaagaagaacatatttaaaatggggaggaaacaaataattttgtttggtaatttttttcacggaagtccattaaaattrtgtttttctcagctgttcaggcaaatccctagcagaaccataagtttctgaagttccaaactctcagacatcttagctcacactccccctcactcccacccacataatttgaaaatccctctatggtagccttcacccctgcacttgttggcttctgacaaatggaaagtcctgacacccttgtgatttactgggatatcctgtggcacctctccaagttggtggtctgcccagacactcattgctgtggtgatgccaacactctaccattttccagcggtaascttggtcaaacatctcctgacatttcaaggagctctgataatttcttgatggtttggaatgttgggttacctagactattcactataggtaatttctccaccagataatgaaggagacagaaccataaagagttaagactttttttttttggccaggagttaatttctctctctctgaggttcacagtaaatattatggattcaatgcacccgtttcattaagctattaagctaaatgtctcagcaggattgatacatttatgagtttagtgcaggcaatgtccctgacatcagcagttctatttttttaagttttcattccttccattcccttattcccctttcttactgtacatagtggtctactgactgaaaatgctatagagaatcattccttactgaatagaaaactaatataaagtatccatttaatgaaatgatgtgacctcatgagtgttaagtgaaaaagaagatataaattaagtttatttatggaaactgacctttttatgaaactctacagggaaaatacaccaagaacccctgacaaattgccatatctttttgtcttttcctatttgtatgttaagaaattatcattttcaaataatgatactaaggatccaaatatacagatttttagaaagcaatgtcacagagcaagaaatttcagatagctgcaattagaggcccaatatctaaagtggaatgaaaacaagattttctgtatttagcttctagccttgctacttagtagcttcataatagtgggcaaaatttttcttcttttggctatgtaggcttccagtatataaaaataaagaatyctgtttacatgtctgaagagrgtgttaggaggaaaaaaaagtcttagtttgtaagtcactgtggacttctttatcaaaatatgtaatcaaaacatgtaaaaatattattgctatgaaattaacaaatccctgggatttgaaattaccattgttttgatccatcattgtcccacagctatggatttgcattcttagccatcctgattaaatgtaggtatctaccctttgggataacaagaagtcatagctctgaatcttcctcgttgacatatagtcagaggtgtatgtcccactttgagcttctcccatgaacagtcatgtaaatcagttatatcttgtcataaaaagcaaaacgactataggcagtggggtaatgtttgggatcattcataaagaagttcttattctttaatagaaaagaatgcttaaattttaaccacttgctataagcctatacatttttgtgttttaagaatattttcttagagaaacaaaaatattaatcgagacttctttttctagtggaaatacaatgagttttaccatgttaaaacttcatgcagccaaggtcctgcttatgtctgtaatatcacaaatctacaaccttatacttcatataatgtcagagtagtggtggtttataagacgggagaaaatagcacctcacttccagaaagctttaagacaaaaggtgagtactaacatactcaatactcagaaaactctgtgtttcagtttttttcttatcacttatttcactaatcctagagatatatgaaattgttctttaaaagcagtacattattatttctagaacttgaatgaagaaattsagaaaatataggagaccttgcaggcagtaatgaaataatactggctgggtctggctggatcctgaactgggcaaaattacttcttctttcagtatccttatttcatgtctagctatgacaattttatggtgataactatatgaaaatagtgttactgaatgttcaaaaaatatttattggctactatatttgagatactaggatgaaaaatataagaagttcattaaaaattaactagtgttctgaaagatataccttaactctgagatgagctctataagaatggaaggaacaaagatctagaaccaaaaataccatttgacctagaaattacattactagttacatacccaaaggaatataaatcattctattacaaagatacatgcacacrtatgttcactgtagcactattcacaataatgaatcatttggaatcaacccaaatgcccgtcaacattagactggttgaagcaaatgtggtacatatacaccatggcatactaygcagccataaaaaggaatgagataatgtttttttgcagggatatggatgaagctggaagctattaacctcagcaaactaattcaggaacagaaaaccaaacactgcgtgttctcacttacaagtgggagctgaacaatgagaacgcatggacacaaggaggggaacaacacacactggggcctgtcagggggaggggtggggggatagagagtattaggaaaaatagctaatgcatgctgggcttaatacctaggtgatggtttgctaggtgtagtaaaccaccatgggacatgtttacccatgtaacaaaccttcacgtcctgcacatgtaccccagaactaaaaataaaaaaatttgaaaaaaagaatggagggaaaatgctccaaaacttatgatagttttctttattttcatttatcacttattttgtttcaagttgagatatattgttaatcttatcaccaattcatcaaatccatcactaataaaaacttcaaatgctcatttaaaaatatgtaatcatataagaatatttctgaatatttctttttttaaaatttcttcttaaaaaataagatacatgtgcagaacgtgcagggttgttacataggtatacatgtgccatggtggtttgctgcacctattgacctgtcctctaagttccctcccctcagctcctatccctcaacaggccctrgtgtgtgctgttcccctctctgtatccatgtgttctcaatgttcaactcccacttatgagtgagaacacgtgctgttttgttctstgttcctgtgttaggttgctgaggatgatgacttccagcttcatccatgtccctgcaaaggacatgatctcattccttcttatggctgcatagtattccatggtgtatatgtaccacattttctttatctggtttgtcattgatggattggcttggttccatgtctttgttattgtaaacagtgctgcagtaaacatacatgtgcatgtgtctttatagtagagtgatttatactcctttgggtatgtactcaataatgagattactgggtcaaatgttatttctggttctagatccttgaggartygccatactgtcttccacaatggttgaaataatttactttmccaccaacagtgtaaaagtattcctatttctccacaccctcatcagcatctattgkttcctgactttttaatagttgccattctgactcgcgtgagatggtatctcattgtagttttgatttgtactcctctgatgatcagtgatgttgagcttttttcatacgtttattggctgcataaatccctttttgagaagtgtctgttcatatcttttgyccactttttgatggggttgtctgtctttttcttgtaaatatgtttaagttccttgtacattctggatrttagccctttgtcagatggatagattgcaaaatttttctcccattctgtaggttgtctgttcactctgatgatagtttcttttgctgtacagaagctctttagtttagttagatcccatttgtctattttggcttttgttgccrttgcttttggtgttttagtcatgaagtctttgcccatgcctrtgtcctgaatggtattgcctaggttttcttctagggtttttatggttttggtttttacatttaagtgtttaatccatcttgagttaaattttgtataaggttaaggaatgggcccagtttcagttttctgcatatggctagccagttttcccagcaccatttactaaataggagatcctttcctcattgcttgtttttgttaggtttgtcaaagatcaaatggttgtagatgtgtggtgtaatttctgaggtctctgttctgctccattggtctatatatttgttttggtaccagtaccatgctgtgttactgtagctttgtaatatagtttgaagtcaggtagcatgatgcctccaagtttgttctttttgcttaggattgtcttggctacatggggtcttctttgattctatgtgaaatttaaaataactttttctaattctatgaagaatgtcaacggtagttagatgagaatagcattgaatctataaattactctgggcagaatggccattttcatgatactcattattcctgtccatggggatggaatgtttttccatttatttgtgtcctttcttatttccttgagcaatggtttgtagttttccttgaagaggtccttcacatcccttgttagctgtattcgtaggtattttattctctttgtagctattgtgaatgggagttcattcatgatttggctctctgcttgcctattgttggtgtaaaggaatgcttgtgatttttgcacattgattttttatcttgagactttgctgaagttgcttatcagttcaagaagtttttgggctgagatgatggggttttctaaatacaaaatcatgtcatctgcaaacagagacaacttgacttcctctcttcctatttgaataccctttatttcttcctcttgcctgattgccctgaccagaacttccaatactatgttgaataggagtggtgagagtggacacccttgtcttgtactggttttcaaagggaattcttccaggttttgctcattcaatatgatattggctgtaggtttgtcataaatagttcttattatttagagatatgytccataaaaacctagtttattgagagtttttaacataaagggatgttgatgttgaattttatcaaaggccttttctgcatctattcagataatcgtgtgatttttgtctttggttctgtttatgtgatggattacatttattgatttgcatatgttgaatcagccttgcatcccagggatgaagccgacttgttcgtggtggatatgttttttgatgtgctgctggattcagtttgccagtattttattgaggatttttacatcaatgttcatcaggtatattggcccraagtttgttgttgtgtctcttcccagttttggtatcaggatgatgctggcttcataaaatgagttaggaaggaattcctccttttccattgtttggaacagtttcagaaggaatggtaccagctcctctttgtatttctggtagaattcagctgtgaatccatctggtcctgggctttttttggttggtagtctattaattactgcctccattccagagcttgctactggtctagtcagggattcaacttcttcctggtttagtcttggtgtatgcatccaggaatgtatccatttcttctagattttctagtttatttgcatagaagagtttatagtattatctggtggtattttgtatttctgtggggtcagtggtgatatcccctttatcattttttttgtgtctatttgattcttctctgtctccttctttatttctctagctagtggtatattttgttatttattttattttttaaaaaaaacggctcctggatgtgttgattttttttggagggctttttgtgtctttgtctccttcagttcttctctgatcttagttatttcttgtcttctgccagcttttggattagtttgctcttgcctctctagctcttttaattgtgatgttagggtgacgatttgagatctttctggctttctaatgtgggcatttagtgctatgaattttcctcttaacactgctttagttgtgtcccagagattctggtacattgtctctgttctcatttgtttcaaagaacttatttatttctgccttaatttcaytatttacccaggagccattcaggagcaagttgttcaatttccaggaaattgtgtggttttgagtgagtttcttaatcctgggttctaatttgattgctctgtggtctgagagactgtttgttatgatttcagctcttttgcatttgctgaggagtgttttacttccaattatrtggtagattttagaataagtaccatgtggcactcagaagaatgtatattctgttgatttgggctagaaagttctgtagacatctactaggtccacttgatccagagctaagttcaagtcctgaatatccttgttaattttctgtcttgttgatctgtctaatactggcagtggggtgttgaagtttcccactactattgcgtggcagtctaagtctctttgtaggtctctaagaacttactttgtgagtctgggtgctcttgtattgggtgcatatatattcagaatagttaactcttcttgttgaattgttccctttaccattatataatgcccttctttgtctattttgatctttgttggtttaaagtctgttttgtcagagactaggattgcaaccctcyttttttttttttttgctttccatatgcttggtaaattttcctcaatccctttattttgagcctgtgtgtgtctttgcatgtaagatagatctcctgaatacaacacaccaatgggtcttgactccttatccaatttgccagtctgtatcttttaattggggcatttagcccctttacatttaaggtaggtattgttatgtgagtttgatcctgtcaccrtgatgctatttggttattttgcatgctagttgatgcagtttcttcatagtgtcattgatctttatagtttggtgtgtttttgcaatggctggtaccagtttttcctttccatatttagtgcttatttcaggagctgttgcagggcaggcctggtggtaacaaaatccctcagcatttgcttgtctggaaaggattttatttctccttcacttatgaagcttagtttggctggatatgaaattctgggttgaaaattcttttctttaagaatgttgatgttggcccccaatctcttctggtttgtagggtttatgttgagaggtccactgttagtctgatgggcgtccctttgtaggtaacctggcctttctctctggctgcccttaacagtttttacttgatttcaaccttggagaatctgatgattatgtgtcttggggttgatcttctcgtggagtatcttaatggtgttctctgtgtttgccgaatttgcatgttggcctgtcttgctaggttggggaagttctcctggataatatcccgaagggtgttttcccacgtgtttccattttccccatctcctcctggtactccaagctatcataggttcagtctttttatgaagtctcatatttcttggaggctttattcattccttttcattcttttttctctcttcttgtcagcatgtcttatttcaataaggtagtcttcaaactctgatatcttctcttccacttggtcgattcagctgttgacacttgtgtatgcttcacgaagttcttgtgctgtgtttttcagccccatcaggccatttgtgttcctctctaaactgattattctagttagcaattcctccaactttttatcaaggttcttagcttcttcgcattgggttagaacatactcctttagctcatcatagttttttctacccrtcttgtgaagcctacttctgtcagttcatccatctgatcctccgcccagttctgcacccttaatggagacattgtgatcatttagaggagaagaggcactctggccttttgggttttcagcatttttttcattggttctttctcaccttcgtgagtttgtctagttgtggtctttgaggctgctgacccttgtatgggttttttgtgggggcccttgttgttgttgttgatgatgatgctgttgttgtcactttctgcttrtttgtttttctttcaatagtcacttccctcttctgtagggctgctgcagtttgctggggttcactttaggccttattcatctgatttgctcccacgcctggatatgtaactcaaggaggctggagagcagcaaaaatgggtgtctgctccttcttctgggacctctgacttcaaggggcaccaacctgatgccagtaggatcgctcctgtatagggtgtcctgacaatccctgttggagggtctcacccagttgggtggcaccaggaggaggacccatttaacgaagcactttgtcccctggtggagagggtgtgttttgctgtgggaaagcccacttgtctgggcttcccagattcctcagaactaccaggaggagaggctaagtctgttggtccgcagagactgcagccacccctccccctaggggctcaggcccagggagatctgaattctgtccctgagcctctggctgcagttactgaagattctgcagggaagccccacccactgaggaaggatgggtgagggttagacctgaagaggcactctggccgctgactaccacagctggtgtgttgggytgtggcgacaagtcttgggaccaagctgtccagcctcgctggctcccgcaggggaaaagcacagcctggagctatagaaatggatgctgcatttctccccgccgcccagggagattagcgtgttaggcagttgggagtcccagtgctggctgctgyccctccctcaaggagctcaaagggcttagacagcaggcagcagaagcctgtgctggtcacccctcccccagggagttcagtaagcttaggcagattccagctgagaggccataagaatctgtacattctaggrttgggatgctaggcctcggtggcatgggatygagagtgggatcttccaatccatgagttgcacagttctttggaaaagcaatttccccggctgggtagcctgctcgctcgccgctccccttggctggaggggagggggttccccttccccgtgtggttctcaggtgggctcactgctcttccttctctctgtgggtcacgccagccttctagtcaattttgatgagcgaatctagataccttgccggtgaaggaytcacacacttattatggtttttttcaataggaacctctgaacggagttgcttctagtcggccatcttggccccgcctctgaatatttctttaatgttgtctttcctcttaatatattctgtagaaagatttcagtgcagaagattaatacttcaaacatatcaaccaatattttctttttttccctaaagctggagtcccaaataaaccaggcattcccaaattactagaagggagtaaaaattcaatacagtgggagaaagctgaasataatggatgtagaattacatactatatccttgagataaggtatgtgtgtttgcaaagtacttgtaaatgacaaagaactaagaagataattataaagtaatcaaaagtaacactatttatgcaaatgtatttatatacaaacacaaagatctttagttaaaggactcacatgcatcattacgttctttgctcaattcctagacgttggtcttggcatgctaattataaacagatcacgtcattctcagaaatctctaactgctcattgacactttatggaaattgtttgatcataggctcatgcaaccagtattaacttaatatcagttttgtttaaaaagcttagctgatgtttaatgttaaataatgatggcatgtaaattcctgatgataatttgcwttagcaaggtgaatactstctagtgagaaatggtgatgaagtagatatttctcatactgtaaaattaggtcaggttctgaaatggtctgaagtgtagaggtcacacaggattctgtattcattggraagattacagtttgcartgtgttcccagggactgaaaacacaccgtcgatgaaaaccagccactgatgarcagcctcagacctggccagtacggggagcacgtgaaccataactggcttagaaggactgatttcatgccaacttgaggggagaattccaaattccaaagacactcctctcacaggactatgaaaccatcttttaagaagttccaaggacaaaagtcacttccataattatagtcctggcaacttgatctttagatctatttttgcttcatctggctctggcattcccataaccttaaaaaatgttcctgttcatactagagaattcccttggcccttatttctaattgaaacctccttgaagtttctgttgctgcttttcatgcagagtgaaatacattctaacctgcagaactgtcttggtggtttgtgactgtaatgatgttcatcaatcaggtcacacatcaggtttttgctaggacctcttttgtgtgttaccctgagtaacaccttaagtgctactaaaatgactccatctaaatactttgcatactccttgctccaggtctccactgtcaggacatagactataggatgactgaatgattgttgtaacttcagtgtctcaaaataagtccttcagtcaggacactctagttagactctgtgtactcactgatggggtagtggaagtgcaaagtgcatgaacttgggagttgaacaagccttattagtttccaaggkttgccacaataaaggaccaccaactgggtggcttgaaacagtagacatttattcttacagctctagaggttagaagtctraaaccaacgtatcagcgggactgcttgttctgatggttctagggcagaatccatctttgcctcttagcttctggcgtttactggcagtccttggtattccttggctcgtaggtgcatcactgtcatcatcacctcctgcatcacaaggtgttctctgtgtccaaatttccctcttcttatgcaagtgccagtcattggattagggtccaccctaaactactatgacctcatcttaacttgattacatttgtcaagatcttatttctaaacaaggtcacattaaaatattctgagtgggtatgaattttgggaggacatgactcaatccagtacacaaaccatgtttaaatgcttgttcttttccttttttgaacttaagtttcctcatctgtaaaatggagatgataatatctatcttatctctttaagctgttgtggactcagtgaattaaaacaacgttatgtaaagccccagtacagtatgttgtaaatagaaggtgctcaaccaacatcagaattcttctttcttttctcaatggccattgtgtagagccrcttcacaaattctcaagggcctctttcttttggatcagagttgtttggttaaacagtgaaatggccaatgctaaaggtgagacgtcacaaaatgtgtaaaaacactctgtcctaatgctttgctcaggatggtccttaaagggaccctcagctccggggaacagctgtgaccaactctgctgccctgctgctcccgatgttcttaccctttccctgcctcttatgagggccagccttcactctctgttggtcttcagaaggatgagtcaattagcagraatagaaccagattctcccacatatccctaagcttaccgtggattggcaccaagtcctaaaactattgcggtctgaaaagtttcagacctgaaatattcttcattgttagagaagacataatggaagaccttgagcttgcctttgatgattctgtaaaaagtcattccagttatgtcttttgaacccagcccttgtgctccttccatgtttcaaatgaaaaacaattggattgactttgaggtggaatgtaggtcaatacaaaaggaagcaacgarcctcagaatctcagatataatgataactttggtagctgaactgtcacactttccttatcaattttgtattctgtattttattgaaatatggsataagtaaactacaaataatgtaaaagactgaaaattgagaaaatggaaacttcccagttaaaaatcatggaataattgtcttataggtttggaattctggagaaagtttacccatgctgttagtataggaaaaaggtactcagctctctcttcaccactgattactcacagttttcttggtgggctgagttaattggctccatgcctcactaggatcactataaaaccatgctgttagcatctgtgttgccagattatgggagaggaatgaggtcaagggtaaattgtgccaaaggacactctctggcgttcagtcactaagaagatctatgaacaactagaaataacaggtatattgtcatgtatattttctgtatttattattttttgcagaaagagcacttcaaataatttacagaaccagaatttaaggtggaagatgacatttaatggatcctgcagtagtgtttgcacatggaagtccaaaaacctgaaaggaatatttcagttcagagtagtagctgcaaataatctagggtttggtgaatatagtggaatcagtgagaatattatattagttggaggtatgttaccatgtctgtctacacactagcttattacctaaaggttcagtaataaatatcagtacattcttaacattagcaatagataatggtgactatatatawatatatatatatatatatatatatatwatcttattatccaaactattaaactattccattcatgtgatgtgatctttctaaaacatcattatcatcatgtcatttttctccccaataataatcagccacccccttaattcctaccacatcaattccatgctcctaattaggcttccaaggctgttcacaatctgttctatccagccatataattctattcacattataccagccttatgaccactcctacattatacataacaggcctaagacctttgtttcttccccaatatctacctcttccactgtgtattttattttagtttatgatatattgtctttctaatcacataggcaggaaatctcagtgccatatgtgatttttccctctactcagtaatcaggtcctgttgattttaccatcttgatttttctctgatgagttctcatcttcctctttccaccttggctttcctaatttaaggtatcatttcttgcctgtgcccttgrcttacgcatactgctgacagttaaatttagttgaagcacaggctggattacttaatccctctctgaaatacccacaatggctctccatttactgctttcagaatcagctacaaacttctttgtggcatgtgaggtcttctgtaatttatcctccaattgtggtttatcttttccaatatttatgtctgtgctgtagccatatcagaccagtaaaaagtttttatgtcacttagtctttggccctgtgtttgcctcagcctagaatacaggtccccactacctaccctgtgccccttagctgtgatttcctattatttattttctgccaattgaaattcttctcatccttcaagacttaaatgaactcatcataatgcttacctgatgctccttagtcaaatgaattattgcattttatacactcacatgctatataaaacttacatgattcttgtttatattatagttagttatctagttagytgtgtacagaagtttgctacccagctcagcaaactttttctgaaaagaaccaaatagtaaatatgttagactttgcaggctacatgtgatctctgtagcatgttcttcttttcttctttttctgttctctttttccttctccttctttttaaaaataacactttacaaaggtaaaacttattcatagctaatagggggtacaaaatcaggctatagccagatttggtcctcatgccatagtttgccagactctggcctacgtgtttgtttcctctacacaactgaaactacctaagagaaattaccatgtttattcctcagtttaatatccatgaaattaaatatgtatgaagatattatacaaaataataatgccaactatttagtatccaaagactgagatttcttggtcctaaatttattaaaaagatatatatgtttcctaagtcattttaaagtagaagattgagtggatatattccagtggtttgttgctctctgcaaaaaaaagcaaaaacaccttgcttttgatttcacatggcataaacactgtctgtatggatgctttcaagctaccaacggtctaacaactggcttgcaaaaatccagtagtagctagctctgctrtattactctgtgtgcttaggtagagctggggcaacttagcttttatctatgaattaawttctttttctgatttatattattagatgatttttggataccagaaacaagtttcatacttactattatagttggaatatttctggttgttacaatcccactgacctttggtaagtataatagaatttttaaaataggcaacaaactgtttacttaatcatacctgattgatttatctcttagttgatctaatctcccacatgaaatattgcctgattaagttaataaaatttacattgttacctttggctatacatttataaccactaacttctgtgaattgttttctgatctaggcataactattttatggaaaatatacatgtacatttcatgttatactttagataaaactacttgcaaggrcaccaacttttaggtttctttaaaacagtatttatttctgattggctgcatacaaatgttttgtggcttatggtttaaaataaataaaagaaaaataaccctgggtacagaaaaaagtatagaattaatgggaggccagtgacaatctttgattgggatagttttggtttctaagcagacaggctggtttggaatgartagggcctcttttgcagaagatccatttctggcttgtgggatcgactcttgctttcagacatctgatctgcttatttcaaatccctgctcatttataaatgaccaggaaggcagaaaaattaggttaggtagatagaaagctattttttttctaagaagatttactttaatgatrataaaatgcagtaaaaacctcaaarggaatggtcaagtactgattggacttttagagttatcacagtgatcatacattcttgtttatttctgtttcagcacaaataataatagcactttctttcattccccaaactgtccgagtttgcttataagatatatggacccctatctattgctaatattgagagtccccaacacactgaatcattaaaagaagggcatgattcttaccagaaaagaacactcaaacacatattaagaaagttgtggcttgttttgttcacaagtaggggtaagttacaagggaaagttgatggaaaagtcacaaacataaagttgaactctcaggataaagacagccaacactttactgtgttctaagtctttattctttctgcaaagtgattggagtcacaatctttatgagagcactttgaagctcgatttgagatttttttcaaagattccacccagacaatatgtgaaactccttcagcaaacttggaaagctaaaaatttcagctgaccctgccaggattttaacctgtggttccagagagtctaagtattgcacagctgatgtttgtgccactaagccagcccctccagacttacgcatatgactgcagtatatttggcagttggcatataggcttgactgcttgtctgctttcctactgggaaggagaattacatgaagaatccttcagctgacctttgcttgctttcttrtacatcaccattgtttaaacccataactctagtggatgaacatgagataatttcagacaacctattgtgcttccaagrcatcctatggatatctgactttctcaggacttaaaggtctttattctgtttgaaattcacgaatttttgagtctagctaagctaattcggttctttgcttttagcagcagtgcatgtggttttactagtaagagcgtgtgtgtgcatgagaaaagaytgagtaattaaaataacaaaacagtcacaattattttaaaatttgtattgtgctgagggcactcatcagttataaacataaaattagacaatttttaaaatgagtgttgacagcctttgcttctgagcagtcatatctaatgcataacattagccttctgctgggagtaggggaaaatgtaaacctgtaaaatacaactgctgacctcaggagcttgccatttaatgagggagttaasacatgcctgtgtgggaagacaaatagcaagatatgtgttaaataataacaaaagacaaaaatagatgaaataagtaagacagtgcataggataagcactcacagagaggcgcaattagtctttcaagttcagatatgaaagattagtagaggttgctgaggtttcagaaggcatcattgaggatgtgggcttacattgggcctttaaaagtgaagcgaggtggtgrgaacatttcaagttggaaaaattaatttagcaaaaggtacttgtgatctttcactgtgtagcccttcaaattgaatttcatgtgaataaaactctaacttcttgaacatagaagctactgtgaaattaagttcaaattttaatgatcatctctcaaagcatgcttgctgctttcaacttctgagccaatagtccagtacagatgacaatcctattgacataattgtattttaatattaaaaaaattttattattataaaactaatactgcttattatataaggaagacagtacaaattactcatgattctacaactagggcagaccactgctaacatttggtaagcttcgttccaatactttttctacatattcgagtatgtgtatatgaacaacaatgataaacactcttgtactctgcaaaaaaaaaaaaaaaaaaaattgccattatactgaaagcattttcttttctactgaggaatataacctggatgtgactgaactcaaaaatgaatttgtttcactaataattatgtttgttttggtttattttgactcgtttatgggtgattttgacaaataagttttaatattaagatactttaatttgtttataacaacagtaagaaatacattaaattttaagaagtgagattaaaaatggtgtagtatgatttgtgtacttatatatggctttttacctggatttaattagttttttataagatattttaaaatcaaattatgaaaacttctataactattctactgatagtgttcttgcataaaaacacttcaaatgcactgttaacatttcctaaaggwaaaaagaagcaatattttattttgtaaattatgtcattttttcctttatagtctggcatagaagattaaagaatcaaaaaagtgccaaggaaggggtgacagtgcttataaacraagacaaagagttggctgagctgcgaggtctggcagccggagtaggcctggctaatgcctgctatgcaatacagtatgtagctttggccatcattatggagcacctaggcaaagggtgggcaacagtaaggagagtgcctatgaattccgcattgcccaagacagtcatggtttataccagtttttctggcataattattaataacttcctcttccactctcaaatgtgacctgggatggatggaaaattatgtggttttaagaaaaatacagaaaaatccattagtttccagtattttgtcatgtagctcaaaaacaaatgaaagaaggagaaaaatattacattgaagagaatagatggtaacatggttggttgacctggaggcagtgtttgagaggagaggagttttgagagccttgtgttacgtggtcagccttaagtcaatcttactccatttcagaagttgtgtgatgattgcccacaaaaccttcttaagatagatgagttttgaacttttgttgccgtcataattaaggaaaatattcaagtgtcttatgcaaagrttcattatattaggatctatgcaaaaaggaattaaatgatcataggccttgctttcagaaatttataatgcaaggtgtaaaaacaaaggatttgaagtagacacaaaggtgmtctaaatcagctgtttagaggtgactttcctttgagcaaatactcagcatatctgctactcaagattctctattaaaaattgaaagcatttttaacatagcagcattttccccccttgtagtattccaagtgagaaacttggctttttaaagttaaccttatggtgatggggttgatttttttggtcatagtaaattttgttttacgtaagatgtcacatgtgtgaaatagctaagagaaaagcttataaacccagatgcatttattactaatttgcagtagctttttatacaaattggcaatctgaagaagttaatacctactaactttgactcaacaagctacaataaaagtgttgaggcaatgcatacacatatatatttttatcaaaattaaggtgcctagaagtggaccatcatgctctgtctgggtaaaaggttgtagaatagtaaagtaaagtaattaggaacccaaagttccacatcaccrtgtcacataaaacacacaatactgcaaagccatgagatatttctttctctctcaaacacaaataccaataccaacacaaacttktacaccctatatatrtggagggtggggagacaaaaatgttgctattttacagtactcttccaacccaagaggagattgaaaatcttcctgccttccctcgggaaaaactgactctgcgtctcttgctgggaagtggagcctttggagaagtgtatgaaggaacagcagtggacatcttaggagttggaagtggagaaatcaaagtagcagtgaaggtaatgtgaatcttygaactccttgacacattatatcaccatatctacaaagattgacctggatataattataataaaagttgagtgctctttgttgaaaagaggactggttgaatgtcgaagcctatccatagctacagaaatcacatttaaaaaaaatcatttcctacataggaacattgtttgtaatcaacaatctccagggtttgcattacctctaaggctactaattagctaagacctatcaggcaatcatttttcttcaaacatgccataagagaactggagttgtgaaacacattcttaaggtactagaccaagggtcagcaaaccttttcttaactgggcagatagtaagtattttaggcttgctgaccatacagactctgccattgtattgtcatagacaatatgtaaataaatgagtgtggctgtgtaccaataaaactttacttatgaacactgaaatttgaattttatattattttcatatgtcatgaaatagtaatattcttttgactttttcaaccatttaaaaatggaaaagccattttcagatcataggctatacaaaaagaggtgacaggctggatttggcccacaggctgtagtttgtcagtctctgactacatgattatttatyatagtatacttaatgtatttttaaggaagcacttgatatactcatatttttgcaaaaactttcttttgrtaaagggaggatgaatcttttatgtaattgagcaatatcctgatctctgcttattagagatttattgctttgagagtgagctatacaactagaaaagttggcaaaattctctctgcttctaaatgatgtcatttaaaagttctttaatttactcccaccttgactgttttaaacaaatgtttatttctctcatgtaacaagatgactrctggctttggttcaggatagtgtgtcaggtcagagccagtatctctgaaattttcttggctgttgttcatgcttgctgcctcattgttccaagatggctgacaaagaarcaagcatcacatcttcattcgggccagggagaggaggaaagatggtgtgagatgtacatgttcaggaaggcaaagtcttcttcaaagctcccttcccgcctcagcagtttttctcttatatgccattgaccatcaccgagttatatgaccaccccaatttccaagggaggctggagaatttyagaatacaattttcatgattagctttgatcarttgcttgggactgggaacctggcctccaagaaataaatcgaaagcaaggagatggagaaaacatattgaaaagaaaattttgaaaattaagaaattggcctaaacaacaaaacttggtctcttaaaatttctaccttttggaggaatattgtgtaaacattactagamctcttattttgcatattcttctactagcaataacaggaggtaacatttgaagggtttgtagaatacatgcacatgttttatctacgatctgtttccagctttcagggtagayattacagaacaaacagaacaatctccattaacccactgagctcacagaaatgtctgctatactgattcctgacttgtttttatgttgtrtagactttgaagaagggttccacagaccaggagaagattgaattcctgaaggaggcacatctgatgaggtagctctgaaataattttctcctggtatgggtaagaagttttaagtccrcttgacttatttttaacacccaaaatgacatgacwtaayggatcatgactaaaacaacatggttgaaacgtttaaatggaactacatctgcagagcaagtagtctatagaggccaatcttctgagcctgggtacaggcaatcctcagrcaaaaggttctcctttcttttatcttcaataaggagcatrttttgcaartgaattctgaagctgtttggcttttgacatgcttgtattcatctaaatgtgtgataatggtcaagtatacccagtaaragagagttctctcaaatgctataatgtcagtgaaaatatcctttgtcttagtaaacttgtctatcagtttgagtttgtggtcataaaaactgctcaagcacatcttaatgggaagacttgaggcagtggttgattgggtctcaagctgtgggttccaattattaggttgggacttacttggtttgatgtcttgagaaaactgtgtagccaaacccgcatttctgagttgttttcctgaaagggagaggatatatttcatacctgtaatgacccaaaacccaatgtttttaaatatcttttcaaggacgctactagtcaaaattactttcttttccaaaatatgcttaatacaaatgttattccttctaaaaaccaacctattttatccatactcatggccactaggggttgccatattacctctttaaggtaagcacaaagaccaggagttggaaaacgaagtgttagagacactaagtyaggggttttgaaggaaactattgataaagaattgctgtactccataaaraccctcggctaggactcctgcttctgtcatatcatccagcctgtgtctttccacctttcagcaaatttaatcatcccaacattctgaagcagcttggagtttgtctgctgaatgaaccccaatacattatcctggaactgatggagggaggagaccttcttacttatttgcrtaaagcccggatggcaacggtaggcagttgggatccataatattggtttcataatgcaaatgccctataattccctattaattttctttaaatttaataggctgcagtggtaaaaccttagaagacttacatggaaagaattattctgtttccttcacattagcttttgacaatcagaaccctgggctaacattctggcaytttctggtcatgtgagcccgagcctgtttttagtatttaatgggagaacatgaccctcattgccagaatcatgtttttctggagcacagggatagcgtggagttggaaaggcatatctctgtacttaatctatatgcctgtctgtcccaaattatatttccagtcttgatgtctttactgagtaccagacttgtatgtccctctctagttgacatatctttttggattttagtaggtatctcaaacatattttgccccaaacggagctcttgatttcgtacgtcctctcctactccacccatctacttccttgctttctctttccctacatccatgctarcaaactctgcctgcaaaacgcagccgcagtccttcttctcttgtatccccagtgcctggagcagtgcacagcacattatgaaccctggaaatactgtggaatggcggacaggactgggggtgactacctgtaggaatctaccttataccttagatgagaacacgtaagataagacaagtcagcaaagtttaaatctggtggattaaaaaawtttttatatcaaaataaacatcatatggctaaaaaattaaaatgtgtgacaaagcatatagtgaaaaacaggagccctgtgcactgcctcattcctacctctcaggccccgcatgtatcttgtggtatttaccgccaagttcctaaatagtctgctcatactgacacatgttgatttttcaatttggggtaaattgattgcccagtatggaagatgaggatttaactctcttagacttcctcataatatacctgtccatccctcaccaygctrcacacaggaaaactttgcttgcctcatcctctgacaattatcacaattttgcagataaaccatccttccaggtttgcattattagaactatttagttattattattatttttagagctgaattatccaaatgttattaatgtaagtttttttctcaggctagtttaataaatatctcttgttttcattttagtttttatatacgtaaactccccaactgaattgtaacacttttctcaatatggctaacagtatcagacaatctagtacttaattttttcttggacacttccttcctggaagcagtgtggatgcttgtgctctaggctagctacacagctgctgttctagggtttccttcacattcaacctgggaatcttcctcaattcttgtccatgtgggactttttccatgtatctcatgactttttgtttgttttagaagagaaagtatgcatgtgcagcaaaaatctgcttttttttaatttttgagaaaacgtcctttattcttccctcacacttggttgataatttggttggacttttaggttgaaaactctttatctaacagataaagccactacatctttctttcctcrcttctacaattgccaataagaattcttatgccactctgattcctgagcttattatcagtggtctgttttttgcctcctccccttcaaaaatttgaggaaaattttatctgtggtactctttactcatagtaaagtaacagttgctttgctaatcattcccttcagttccaggattttttttcattgtctctttgataatgaatagaattccttattccctctatttctttgttctagaaatcctgttataacggactgctttgtttcatcttctcattctattagctgctctctcctattttctagcttttgtcattttgccttctattgtgatagacttcctcaactttgtccccaatctttttgtagaattaaaaatttttgttaacatattttaatttttcacagtcttgttcttgtattttgactgctttttaaaataatattctggttttgttcatagatgcaaaattttactcatcttcttttagggtattaattatgcttttcaaaragtgttaatttgcttcctgcattgtcttggcttccttgttcctctttgttttggaatctgattcaatgtgagaatctttctcaaatgtttagtattcttggctggtttcatatttaatcgtgaggcctaacaaaatgatgggaacctatgtgtccaaggaagcttccttttggtgttaggtgggaccctgctcttccactgggggtcctccaatgtcagtaactgaatcttttccctgacatatgccagtttaaccagggaggaaattgctcgtttctcctctggacagtaaatgcctgatgcatcaactcagagcgtttagagggggctggaggtctcaaggctcagtatgtggactctcatttaattttaattctctgcatttcagtacagtgcctcagtgtgactggtagtatctctgaacttggagttgttctggttcaggtttctgttgtttttatttgtttgttttctatagacaaaagccttcatctgtggtagaagaatctatgatttagttaggccttaaataacctaaacgttctttttgctttcagtccttcttcttgtccctgtattcagggatacctgctgcctcccattctggagactatgagcttccatagtgaaaaacagctcaattcttgccttttctttctgtaggcagtcagctttcatctctcttggctctgctaaattaccactcctccatctgctttccctcttccagaatgctttgtctgccatgtcagttctcatgacagttgatttgcccttgtgaaattatgaaaattttcactatactgccatgttagtaaggtttggggagagagtggaactaaaaatgcgcacattcaatccctcatcttaaacaataaattttatttgtagatttgtcttgttttgtggtggggctgggggtatgaaaagtgaagagaggatgaaaaaggatggactgaaaaaaaaagtggatctactttttccagatcgttttgagtcacccaggatcctaatgcttataaagattggttctcacatkcacttcagctgttccgcagcctttcctggtggttgccaaaaacagcttccagggcttcgtctccttcgctgcaaccatagagacatcgttaggtgctgaaggcagaatgaaggcctgaggcctatgggagccatcacaaatgctactctccctcctgctgacttcttttgaggccagcctctccccacatggagtgctcagaggcactatctcagaagaaccagcagaggcctttttctctttctccctgcattcaaggactattttattgggttgaatgcctaagaattgactgcagctaggcccggaaagcttagtctagtcctttgttctgaggactcagtttcttyatctacaaaatggaatattgaatcaaaagcttcctaagtctccttttaacttttttttttttttggacagagtctttctctgtggcccaggttgaagtgcagtggcrtgatcttggctcactgcaacctctgcctcccaggttcaagtaattctcttgcctcagcctcctgagtagttgggactacagacatatgccaccatacccagctaatttttgtatattttttgtagtagagacaaaatttcaccatgttggtcaggctggtctcgaactcctgatgacctcaagtaatctgcctgccttggcctcccacagtcctgggattacaggcatgagataccacacctagccttaacttttgttaaaaggattgtattaagatagaaaaaagcgaaacaaacaaacaaaaaactgtcaaagtaatacaaatatgtagtaaatgtgctgccttccagataacattaaattcaccaaatttttcctgggtgtttgctatacaacggtgaaggatgtagttcttgcactcaaggaacttgctacatggtaggttgtaagtctacagacacaagtctacagatacctaaataatccacttaaagtaggaagtaggtggactcattagagtgcagtggagaatatacygcagaagcccagaggaaggagtgatttccaactgaggaaasctgagagggcttcatggaagaggtcttctgattcagacacaaccaaagcaggaggtagaacagtagctgaactatactttcccactgagttatgaragkctttgactagggatagattgagatcaaagtttaatctatctgaagggtttaacaagagatgacaggtgrtagtccagagtagcatctagagtcaaggaaacccaacatgcagtgatgaggtatcccaacaggttgatacatgggatatcagaaagagagaatagtcaragatccaagcaggcaggcagcattatgaaaatctgtcagcagggaacagggcactagccaccagactgaaattagggagtaggatsctaggcctagagaaagtcttcacaggtagagtaggttttgtcaagagcagagcagggttccatgtacacaggaaccagtgaaccattcaagacatccagcagggactcagatacgggccatgataatagggttggaggatattgatttgggagtaaggtcatagcctagttattagccctaggtgtggctgagcagaaccatggcaatagtgagccccagaacatcaggattattcctagtttgggagcaagagataaacgtgtcaggggaggtagggagaacaccacttaagagcatttgtttttaaggaattgagggacttggaggtttggaatcatttgagatactcagctaaggctgtccatggaaatcaagaaacaggagcacattccaggagaaaaaatgatagcaggaataaagaagagaggctgagaaatgcagagtaggtataaggaactgcaatcggaccagtgtaacggaagcacagattgagagaggagaaacagtaggaaattaatagacttgtagaaaggctggtgcakcctgggggtgctgtggaggctgtgctcaggaattcataatggactctacaggaagggggtcacaacaaatcaagctaatgaaaaagcacaggaggctggagacaagggaaatttttgaatgcatcaaattagggatgacaaaagcttgaaccagggtaattgcaggacaatggaaagggacagacaatgtaatatagcttcagggcaggaactttgaattttcccagtatggtactaataaaaacttcaactggcttcttttcatgtagaaatcattgcaaccagtacaggctcaagtgtatgtttgtactcactctcttagatgagaggagtaatttgaaactttgaaatagggtattgctaacaatttgcatggggctcgtatgagaaacaagcccattatcatgactggcaagacagagtgccattgggtcaataattaaaccagctagcacttaaatgatcattttgactacttatgagagcagcaactgtttattaagtgcctgttatcgaccagccatatatgtaacttacttgaattttgcaaggtcagtattattgcccattttacacatgagaaatttgcttagtgagttaagtaacttaagyaagttcacacaactagtaagtagcagaactaggtttcacatctcgatctgtctgacctgacacctggaggtctttccaataaagattccatattgcctctacttactaaacatagctgtcattttttatgtatatttgcgtaggaaacatataartttgttttcctctttgtttgaattcttataatcataactaaaaatccctttaaaacatcagatacatacatgcatatgcatatacatgtatccacttatattcacacatatatgtatatatttcatgcaaactagatarctacctgtaatttttctttcatttcttacagttttatggtcctttactcaccttggttgaccttgtagacctgtgtgtagatatttcaaaaggctgtgtctacttggaacggatgcatttcattcacaggtacaattctcttctggatacagggttattacggatattggcacaataatcacctgtagtgcaggtaaagcacacaagataattaaacattttaattccttcaaactagcaataatttctattaaaagtctctcttataaatcattctactgtaaagacacatgcacatgtatgtttattgcatcactattttcaatagcaaagacttggaaccaacgcaaatgcccatcgatgatagactgggtaaagaaaatgtggcacatatacaccatgaaatactatgcagccataaaaaagaatgagttcatgtcctttgagggaacatggatgaagctggaaaccattatcctcagcaaactaacacaggaacagaaaaccaaagcaggttctcactcataagtgggagttgaacaatgagaacacatggacacagggaggggaacatcatacaccagggcctgtctggggttgggggcaagggaagggagagcattaggagaaatacctaatgcaggcrgggcttaaaatctagatgacaggttgataggtgcagcaaaccaccatggcacatgtatacctatgtaacaaacttcatgttcagcacatgtaatccagaacttaaagtaaaaaaaaaaaaaatagtttctcttctttacagacctactagggctacttctttgatttctggaactttattgttgttattattattattattaaatataacttctgccacagggatctggcagctmgaaattgccttgtttccgtgaaagactataccagtccacggatagtgaagattggagactttggactcgccagagacatctataaaaatgattactatagaaagagaggggaaggcctgctcccagttcggtggatggctccagaaagtttgatggatggaatcttcactactcaatctgatgtatggtaagtttaacgggacacagagtaatgctgacagaatcatcaaacattagaggggattttaaaaggacatctaatcttgcttttttaatgtgagaaaacagaagaccagagagattaagtgatttgcctcaagctaaagtgagagttggtggtcaaggtggtactattcctgggtctcagcagtttatgctcctccctgaatcagttttgttatgaaatagatacatttcattcaaatattttattacattccaaagatgtaaaagcctatgactaataggaattrgtacttaggaattaatgtccaagtgtgtgcccaaatacctactatttgggaatgtttggtcattaatttatcagtaaactttaaatcatggatttaaaagtatcctaaaagattaggacactggggagatttggacatccctttattatttgaatgatgccccttatttttgtttgttgactccaacttttgaatagaacagctcaaaatgtaaaagtttgttcaatgacttttaagttgggctggccctaggcaaaattaygaatgagataaaatttctcagtgctgccaatttttattcatgccttccctctcaatgtttactggcactttatcccctgcaaacttgggaggaaaatgctgaaatgtttttgtgctcaccctttggtgtgtctgcatgtcaatgctctgaaattcttagataatggaggcctacagtggggattcagtcagggagagaaacagagtatgagttgtgtgtatacatgtatatatgcatgtatgtgtgtgcacgtgtttctgtgtgtgcatgcatgtgcatgtgtgtctgtttctgtgtgtgcatatgtgtatatgtgcgtggatgtgcatgcatgtgagcatgcatatgagtctgtctctgtgtgtgcacatgtgtgcctcctccaagccttcctatcacctttgaagtatttgctcatacgcagtgtcttgttctactttttcttgtcagcctgcttttatatctgccgtttgccttttatgaggccaataatacactgacaaagtagaccctgctagccccaggaaaaatgttgttggagaaactactgtaaacctggtgtttgtaataagtataattaaagcaaaccctctactattcttaggtcttttggaattctgatttgggagattttaactcttggtcatcagccttatccagctcattccaaccttgatgtgttaaactatgtgcaaacaggagggagactggagccaccaagaaattgtcctgatgatctgtaagttaattatgttaacatatgtatcccccaaacaaaaacatgtgcacatacaatcttaggcctcttgatatagtttgttaaattgttaaaataagaactggaacttaaatattgtataccccacataaaatatcaattcattgtgtcaatttgtgaatatattatggcttctttttaattgtatatacacatgatatttcactgagaaacaaaattttggagagtaaaatacttctggttaagtaaaatacttctggttaagtgaattctaataaaagcactccgagtgtrtgtgtgtgtgtgwgagagagagagtatacacacacatatgccttttattttgggagatatgatttgactagtatcttaatctacatattaaaatattatactaaatgggaatatattgttaaaaagttggattccctttgttgatatagctgacattgactaataagaaatagtattactaaaaattatacaggttgtgacctgtttatgaacataacaaaaaatgactaagtattgtaactttagcgaatcctggccattattgaattccaatagtgatttctcagaagagtgagtgaattttagtcaaattataaggaaaaaggtttttattctgagtattaatctgcctccttgtggaaagtatcagcagaaatattaagtcttgacaactttttccaagaattgtcttacccaagaagttcctaaaagagcaaataagtatgaactctccatgtgcaccatagcatgccaaggattgtatggattacagaggtgtttaaaccagggacacagctcttcagcatctcagaatgtgttttgaatgaaaagacacccacagagagcagttggatgccaagccaacatgtaataaagtgctaaactgtgtggtacaggcaagtgcaaaaggaattagcagtatgcggatgcacaccatggttgtactgccttgactatgctgtgttatttagaggattattcagacttgagccaaaagatgattaagagctgggcaccttggttagatgttctactggtgaatgtttttgtattatttaaawcttccagctagaagaagattggaattaccrcttgtttctgatttaacttaatagtctctgcgatgtttacagggagatcagatacacacacatctgaccaaatttgatagtagtgcataaaaaatgattcataatcattttggggggaaatggggaaaaattatataaattaaggataagaaattatacaaaatttgaaaacctttcatgtarggtttaagaaaaaagcccaggatacctaaatacaaaataaattttaattaaatatttacaaactaatcactgttttgcatctcttacacctctgtcaaacactcagaaatttttgccagaatttcagttgcacaaaattttccttgtgctgttagaatgttatctggcttatgccactctctccccaagggttaacgtgcctcgtcacaatcatgcaatatttttggataggcagctttgaaattgatcactaaactatcagttttgactgatgtgtttgattattttgtttggggcagggggrttaataacaaattgctgtattgtggagcagaaaaaggtagacaagttgaactttgctctatctaaaggtataaaaaatgcaactagaaggaggaaggagcagtgctagaaaagtattcctgattatgagtggaaaaatataatattctatacagttttatcttgaataatttattgattggattgccattgttttaataaaaatatagtttatttgaaatgaaaattttccattggtggttttgaagttcatttgaacatcattaataaaaataagccatgcatcaagccctccaagtgctgcaggactctaacaagccctgggaagggttaaagatccgttgccaaccaggaaaacaagctgggctaggaaatggagatctcagcaataccattcaatctggccatggccttaagttgtcatgataaagattaactactctccttagagtacagagggaactgatatttatttgaagcagttttctgagatcacaggcccagcttaggggtttgaaagtctgcactgagccctgctacaccttccatttactgcttaaatactcagcacctggatgcactccaggtcaggtgagcccatagatagctatgctgtactcagctattaatggaatgccaggttcagagcattcctgcccttctctccatagcctgagatgtacgatagaaagcccagccatcaggattctcttcagkttttagtttgcacaacaaccacaccactcctgagaagaaatgggatcaaagggcaatctacttcaagtgagagctttctggggttttataacagatatatcacagtggcaactggaattactggagagtccctcaggtgtgggaggcaaccgtgggagaacacagaggttcaccatgttatttttacatyttaaaaaaatatgtacacctagatactaatcggatctctccaggattaggtataataagtaaggaaaatcttgaaggctgtattttatgtactttgtttaaatacctgtagaaacttttccctttaatactgaaaaatactatgacgttttcatgtattgaagttcaaytgctttgtgaattcaaagtctttaatatgcatagaggctaacattggatatagctaatgagtcctgtgctattttgaaaaaaaaaaaaaaaaaaacttgaggagaagagttgtaaagagtttgcatggtgagtggaggaattggaacctctacttagscaaatgagatacttcaagtataatgagtatttttctggagccaaaacaaccagcccaggtaaattttaacaaacttgaaggacctgcaaatttgtttagagtaatatgtttgaatatttgtaactataacttggtgcgagtatacactgcatgatatagaatggtgacaaggacatatttgtaagggaagatcctccatgccaagactatagttttcattgttaatttacttacaagrtataagaaatacatttaggattattaaaagcctcttcatttcattccattgccagtttattgctatttgagaaccgaagttttattctttacttttagatgackgttgcttatatagctcctcttttcttagtcctcatttgtccctacatggtggaacagaaagggtttatatattaacaggtcaaatgtgtttgtcatcagaaaattaagtacagagtaatgattggattaaatgtaaatttaagcctccataattgaaaaaaataggaatttctaatttctgcttaagtggattttatagattaaacaagaggctgaacttttggaggtagaatgagtgagtgatgtgcaagtggctaagtggcagctgtaaggatggtttctttttcccccaccttcctcttcccgggcctcctcttccttcttctttttctttctctccttctaaataatctcactaagtatcttgatttttttgcagaataaagcaggttataagtaagtatggcaatagcccttttttgtgggagatatgttccaaggcccccagtggatgcctgaagccaagaataatacctgtattagttcrttctcacactactatcaggaactggtaacttataaagaagctgggtaatttataaagaacctgggtaatttataaagaaaagaggtttaattggctcatggttccacaggctctacaggaagcasggctcaggaggcctcaggaagcttacaatcatggcagagggtgaaggggaagcaggcacagtctttcccatggccagaacaggaggcaaagagggagcaagaggaagaaacaaggaggtgctacacttttaaacaaccagatctcataagaactcttatcaccaaagcagcaaggtggaaatctgcccccatgattcagtcacctcccaccaggcccctcctccaacactggtgatacaattctacatgagatttgggtggggacgcagggccaaatcgtatcaatacccaaccttatatacactatgttttcttgatctgacaacctagtcaactaatgggtaggtagcatatacagcatagatatgctggacaaagggatagtttcatgtctcagtttcatgtttcattacactactcagaatggcatacaatttaaaacttatgaactgttcatttctggaattttcctttaaatatttttggaccatggttaacctcaactaactgaaaccatagaaagcaaaactgataaggagggacaactgtaaaaacctcctaactgaaatatgaccaaccttgagagattctctctatgccttggcaatatttttgaatcacagctttattttcaaaaataaaatgcttcactttttcctctcaactctgaggacaactgttagattaatcatcaaaactctactttattttttaaattctgtgatctgacatcgattataatatctcatttcaaaggctaatgatccttcattgacatctttgtatcatccccatttctaaatggcacaggttatagagaactatgtaaaagattagrttgtcttttggttatttctcagatatgattctaattttaaaaaatagagccaagcttggcactgtatacccattatgtaaattgcttgtaatacatgtgaagtcatcagatcaatacattgaaacagtccaatattggttttccttgataccatttattctgatatggtgtaccaactctgacctgaggtgcttgttaggaaacgaaataaatggaagtggagtttgtatgccatattataatggaatggagattgcattataattccccaaatggatactagctattttaaatacaatacctataatgatttctgggccatcgttacctagtgattataatcttgttctagctccacaggcattacctcagtccacaccatcattatctctcatctagtcttctttaatagtttccaacctgcccctttataatttatagtccacatatctgctagaataatccttaaaaaatgtaaagattatgtccgcttaaaaatcttgaaaagcttccccttgtagtgttgtaaaatccaactccttgcctgccctgtgagacctgcatgatctckcttccctcctctgatctcatctcatcctttcccctcaatgaccacacttcagtgacactggctttctttcaggttctaaaatgtgccaagctctttccaaatttaggactttacacatgctttccccacttgtagttccctgactcccatccacaccctattcccatgastagtatcttattttcttacaaagttctttggcttaaatgtcacctctgsagaggggccttctgtaagcaactttccaaaactgtttcatgtctattagaactcgtgtttgttttctttataactttgcaaagaacttataatttgtgattgtatatttgttcatatagtagtactaatattttaagtacctcccaatctgtttctttatcagttctctctccctgatcctgatctgccatatagctccagaaagtaaaaaatgagagcaagtacttgtttataataagtcagtaggcttgaaaaccaggcttggaatatagagagcatctacagtcctttagctccttgttaatgttttaagtactagattttaattgtctgtgtaaaaacatacaattttatataaggwtagtcaaattaaaaaaggcagtgaatagagccctcattccttccaagccctggggaagtgaagaaagaagagaacttgatagaggcgggagggtgaagatactggatatctgggtttggaaacctcctctgtaggcttcaattagaagagatgggtaccaccaaagccaactgctcagtcacccctagtttgggagaattacaaagagatcattgagtggaggaccctcactttgacatgggagacccagcattgtsaagaaggtagaatgacttgtccagacagaaaggtctagcttatgcttccaaacttcctttgtttcctatattgggtgaacattttgttgagagctagagattctgccaagtagcaccctgtgggcctacagcagaaacaggaatggattccctgggccttgagagcatctacagggcttgatagcatctaagaatcctacagctagagatagacaagtttggaccactgtagtggggaagcgtcaaaagaataggtaaataattcacagattgccaataggggctgatgcctaggctggatcagataagtcactccttattgaattctggattagccactgagactatcaaagatatggagggcacagtggggttcaaaggattcttcaccatgcctctagaagtcacataagcctcgtactcaacatatatcctgacactaccttagamaggaaggcagagggagtggggatggcctgaaaataagagaggttgggttattatccagaaaagactgaatattacttaaaaagattgtttaaaatagtgggactaagttataaacaacattgtactaaatgaagtttcttttcttatgctaggtagggactctgaaaaagacctagttaattataaacaatataawatacttacaatttttctgcttatatgagttgaggtgtgatgaattttgcctttctcttataattactatacatatcatctatgaggacaagagtcacatggccatgtccctagctcctgatatactgctggtataaaacaagtgtccaacatctttgctgagtgaatgaatgaatactacttaagagtgctgcacagatatttcttggacaaccattaaggaaaagataatgtttaattaaccagctgtgaatgtctagggaactcaacctgactataatgaacagtaaaacactggcatcaaatctgattgctgcttctagttctgtcactaaatatctgtgtggaatggagtaaatcttttaaatgtcagcctcttcaacaatttttatagctattagtttctttatgtgttgatacattatgattgactataagactgacagtgcaggtgagacctttaccttgagagcttagagagctacttgaacacccttgattaaagaatggtcctcttctatcagggaaggtcatcctctccaaccaagttttcaacttcaggagggttacgcatggaacactggaggaaagggacacctgtatagccagacatcagctgaatcaaccctggtgatcaatgggtggtagatgttgaagccagatcaccctcacaggagaccttcaccttgagtagttgagtgttgagtagatattttcccaccatctacttatccatctatttatttggaataataactgttaaawtaatgtcagcttttcaaaagaaaggtgttatctaataaacgtagtaatgttaaaagccactcttaaataagaaatcaaagcctttgttttgattcacttatattaattaaggaaaactggcaataactcagattctttcctttctaaaatgaccctacctgggttatcagtaattatatccaattgctatttactttcccatctttccccatatatttaggtggaatttaatgacccagtgctgggctcaagaacccgaccaaagacctacttttcatagaattcagraccaacttcagttattcagaaattttttcttaaatagcatttatmagtscagagatgaagcaaacaacagtggagtcataaakgaaagctttgaaggtaagtttgattcttcagaattttcyagttttcgctgcactgtgaactgaacaaagttaaaatggaatgtacacagaaagcattttggggtaggcaaaaagaataatayactggcacctttgtcatcataattaagtgtttattgcattcctctttgaaaattatttgtattatgcactaaattgaaaaaataaaggatagttctatggcccctggatttataatctatgacagtaaggaggagaattaacatgttagactacattttcataaggtctgttctccttctcttctccccccacacaccagtttggacctcaagtacagagttaattatagactctttgcttacrgtacattatcatcattrgcctatgcagggctcctgtcttgtttgtttgtttagccattttatccccatattcctctcctcttcaacttcctccctccctgtcaggcaactattctaacgtctttagtgtgtatcttttcatttgtatgttttcctgcaaaatgtgtatttttttaatgaatgaatgcatttttctttctgttttcattaagcactgtatttttaaggtctgtccatgttgctatgtatatatctaatcctttgcttctgatgagtaattttgctatgattattgtagkggatcaggtcttgctaagatctagtctgattctatgacttcagtatttggtgattaagttaataatattctgtgccgggtgcggtggctcacgcctgtaatcccagcagtttgggaggccgaggcgggcggatcatgaggtcaggagatcaagagcatcctggctaacacrgtgaaaycccrtctctactaaaaatvcaaaaaaawtacaaaaaaaaaaaaaaaaaaaaaaaagcctgtcctggtggcgggcgcctgtagttccagctactcgggaggctgaggcaggaraatggcatgaacccgggaggtggagcttgcagtgagccgagatcgtgccactgcactccagcctgggcgacagggtgagactccatctcaaaaaaaaaaaaaaagataataatattctggaaccattctactataatggacagactaagccttttacttaaatgtaaagagacttaaaatacagtagtcacttaattcatttctaaagtcacatttactgttatgtatgcctaattggctgcagaaaaatgaatttaaaatatttctccttcagcttatctagaacttcttgttattaaaagtttgcaaggccctttgtttatttaaatgcagacgtccttgcttacaaacgaaactggcaagatggatcgcaacttagaatctcgcagaaattaggcttcttgctatttgcagtgattgactataagactggcagtgcaggagacacctttaccttgagagcttgcagagctacttgcacacctttattaaagaatggtcctttcctatcagggaaggtcatactcttcaaccaagttttcaacttgaggagggctacacgtggaacagtggagaaaggggacaccygcatagccagacatcagctgaatcaacctggtgatcagtgggtggcagatgttgaagtgagatcaccctcacatgagaccttcaccttgagtgatgcacttgactaatagcagataaaaacaagaagcccatggacagacatctacttgtctatgcgtcttactacatattttgggtgactttggatccattatatgagcataaaactctgatcatgtaacttcttcaacacaaactgcyaagcgacagattggaaagggctgcacatgccttggccatgcgtcataaccctcattagagtaaaccttgttaatagtctcacattgtttctactcactatcatcctggacagagctgattcttagaatgccaatggcagaacacttgggaattataactggcacagcaactccatccttttggggggctctayatatatacttgcctatgtgaagatcacayaggattaggcaaacatacccttaagccattctaggtactattaaggccttgtcattttctaagcatttacttaatgagacatttctctgaataaaattttgataattaaaaaaattatttcaacacttactgatctgggggcaaggcatagtgtaagcacctgtatttaatgtcttccatttgtctgctttaaagaaaaacaagaggtgagagtatttctttctcttggaagctagaatcagtttctttaattttgtttgccaagtttagtagtaaactagctttaactggtgatactgaaagttgtccttgtcataagactacatctatatccataggaaatattggtgtcaccagttcactrtttaataataatgttttgctcaagccattttaatctgctccagcatggcctggttcttatttgtcataacttcacatatggaaactttagaggaacaatcatgcagagcggtttgccaatacataaaattaaatcttttgttcctaagatagaaaaacatcartaactgggttgaattgaatatagmcatatctgaaagacaggcaaaacatggtttwgcttgcttggcactgaaagcacattttcttaactatatcactcctctttttttwaaaataaatttatggagtacaagattgtttagtaatgaagtcagggcttttagggtatctatcacctgaatattgtaccttgtacccattaagtaatttcttattcactctcccacacccttaccctttcaagttttcattgtytatcatttcatactctacgtctatgtgtacacattgtttcaatcctactgatgagtgagaacatgtgatatttctttctgtgtttgtcttgtttcatttaagataattgcctccagtttcatccatgttgctacaaaatacatgatttcattcctttttagtggctgaatagtatttcattgtctataacacattttcattatccagtcatccatagatagatactaggttgatctcatacctttgctattatgagtagtactgtgataaacatatgagtgtaagtatgtttttgatataatgatttcttttcctttggatagatacctagtaatggaattgctggattgattgctagatcatatttttagctttttgagaaatctccatactgttttccgtaaaagttgtattaatttacattcccaccaacagcatgtaactgttcctctttgtctgcatcctcgccaacatctattatttttgactttttagtaatggccattctgactcggggaggatgatatcttattattattttaatttgcatttcgccgatgattagggattttgggcatttttccatatacctgttggtcagttgtatgtcttcttttgataaaacatctattcacatcctttgctcactttttaatgggattatttgcttgtttgttgttgttgagtgtttgaattccttgtatattctggatattagacccctgttgagtgaatactttgcaaatattttctcccattctgcagattgtctgtttattccactgattatttctttttctgcacaagctttttagcttaattaagtcacatttgtctatttttgttcatgttgcctgtgctttcagtgtctaagtcatgaattatttgcctagaycaatatccagaagagttttccttaggctttcttctagtattttcacagtttcatttattacatgtaagtctttaatccatctttgagttaatttttgtatatggtgagggtaagggtccagtttcattcttctgcatatatccaatttccccagcaccatttattgaaaggggtgtttttctccccagtrtgtgttcttgttgactttgcaaaagatcagttggctataaatatgtggctttatttctggattctggattctgttccattaaactatatgtttatttttataccagtaccatactgtttgattactatagccttgtagtattattttttaaatttatttttaatttttgtgggtacatagtagatgtctatatttacagggtacatgagatgttttgatacaggcatgtaatgtgtaataatcacatcatggagaatggagtatccacccctcaagcatttatcctttgtgttacaaaccaattttttacttatagttattttaaaatgtacaattaaattattattgactatagttaccctattgtgctatcaaatatttagtcttattcattctttctcttttttgtacccaataaccatccccaactcccccaccctgtcccttactacccttcccagtttctggtaaccatccttctactctctgtctccatgggttcaatcgttttgatttttatatttcacaaagaaatgagaacatgagatatttatctttctgtgcctggcttatttcacttaacataatgatctccagttccatacatattcttggaaatgacaggatctcattctttttatagctgaatagtactccactgtactatatgcatataccacattttctttatccatttgtctattttttttttttgagacagtctcactctgtccctcagaccagaaagcaatggcatgatctcggctcactgcaacctccccctttcagtttcaagcgattcttatgcctcggcattccgagtagctgggactacaggcacgtgccaccacgcctggctaatttttgtattttttttagtagagactgggtttcaccatgttggccaggctggtctagaattcctgacctcaagtgatccgcctacctctgcctcccaaagtgctgggattacaggcgtgagcaactgagcctggcctatccatttatctacagatggacacttaggttgcttccaaatcttagctattgtaaacagtactgcaataaacataggagtgcagatatctctttgatgtactgatttcctttcttttgggcatatgtacagcagtgggattgctgaatcaaatggcagatctattttcagttgtttgaggaacctccaaactgttcttcttagtggttgtactaatttacattcccaccaacagtgtatgaggattctctttctccacatccttgctagcatttgtcttgcctgtcttttcaatgtaagccattttaacttgactgagatgatatctcaatgtagttttggtttkcatttctgtgatgatcaatgatgttgagcactttttcacatgtctgtttgccatttgtatttctttttattagaaatgtctattcaaatcttttgcccattttttgatcagactattagcttttytcctatcgagttatttgagctccctatgtattctggttattaaccccttgtcagatgggtagtttgcaaatattttcttccattctgtggattgtcccttcactttgttgattgtttcctttgctgtgaagaagctttttaaatttgatgtgatcccatttgtccatttttgctttgactgcctgtgcttgtggggtgttgctcaagaaatttttgccccaaccaatgtcctggagattttccccagtattttcttgtagtagtttcatggtttgaagtcttagatttaaatcttcaatccatttttatttgatttttgtatatgtagagagataggggtctagttttattcttctacatatggatatccagttttcacagcagcatttattgaagagactgtcttttccccagtagatgttcttggcatctttgtaaaacatgaattcactgtaggtgtgtgaatttatttctgtgttctttattctgttcttttttatgtattccattctgtatatgtacctttgatctatgtgtgagtttttatgccagcactatgctgttttggttactataggtctgtagtataatttgaatccagtaatgtgattctttgagttttgttccttttgcttaggatagctttggctattccgagtcttttgtggttctatataaattttcagatttttttctatttctgtgaagaatgtcattggtattttgatagggattgcattgaatttgtagacaactttgggcagtatggccattttaacaatattgattcttccaatccttgagcatggaatatttttccatttgtttgtgcctcctacaatttctttcatcagtgttttgtagtttcccttgtagagaattttcatctmcttggttaatatattcctaggtgtttcattctttatgtggctcttgtaaatggcattgccttcttgatttaattatcagctagattatttttggtatatagaaatgcactgaatttttgtacattaattttgtatcctgaaactttactgaatttatttatcaaatctcagagtttcaatgataagagcacgctaatatccctgatgaacacagatgcaaaagttctcaacaaaatactggcaagccaaatccaagaacacatgaaaaagatagtatactatgatcaagtaagatttatccctgggatgcaaggatagttcaacatatgtgtatatgttgaagacacattttgtggaatctttaggtttttctagatataagataatatyatctgtgaatgccttttatgagatgcctttttattttctttcccctgcctggttgctctggctaggacttacagtactatgttgaataagagtggtgaaaatggccatccttgtcttgttctagttattagagaaaatgttttcaactttcctccatttagtacaatgttggctatggatttgtcatatataacctctattattttgagatatgttccttccatgcctaattttttgagagcttttattatgaaagaatgctaaatcttrtcaaatgccttttctgcctctgctgatatgatcatatggtttttgtctttcagtctgttgatgtaatgtatcatgtgtcttcaacatatacacatttgttgaactatccttgcatacctgggataaatcttacttgatcatagtgtgctatctttttcatgtgctcttgggtttggcttgccagtattttgttgagaatttttgcatctgtgttcatcagggatattagcgtgctcttatcattaaaagcaacaaataaggctcaaattttttgacagataaggctcaaattctttgtgactataattttatagactttattaattaacacaatcatgaccttcttaaaagtttaaaaacaatttttatgttattttacaaccataaaaatgacttctgattcctttctatttttcttgtaacttttccagtaatctcagtaactgttcttgctgtattattttataattgtatctacattttaaagatctttattgtaaaagtaatttatgtttattataaaaaatataaaattacttaagcagtctaaaaagtaaaagtttcctaattcatccttatctcactccccagtgctagccagagctaacaatttggttatatatttgcagatattgtatgtgcatatatagccatttacagaaatgctcatttatgtatgtttgtatatatactatctggattcagatactaaatttaggtaatctaaaggaattcatgggctgtagattctgtagtaggttctccagcatttttttcttacaaataagcttatttttaaggatttggtgagaaratgattttgtattacatcttctgccagaatccaggaaatgagcattctatgttgttattgagaagaaatccatgttctgtgggagtccagaggaaggatgccaagtctacactatggcagagggagagtcaagaaaaaccattgggaggaggttacatctaagctgagacctacttagaagcttaggtatgaaaaagagaagctgaggtatcctatgtatttcaggatagaagaagcagcatgtagaaaggcagggaataatagagaatgaggtattcatagaactgcactttgtttattatacatgagaatgtggcaagtgataaaattggagggttattggtcacactaatcaaaagtaaggaatgaaaagtaatgaaagctgaattaatgaatggtaacaggtgtagagagaacaaaaaagagtccggagttaccacagaggtagatgctatcggacttggcaactaagtgcgtaaaaaagagaaaggagaaagttggtaaaaatcaacgctattcctggagatgaggaacataggaagaggaacagttttgcatatgtttggtttgagttggcttggcatatctaagcggagaagtccaggacacagtcaagatatgggttcatactcagttgaaaggtctgtcctgtaaatatagatggttgaagtccagggtgcagactaggtcattaaagtagagtgtatgaaataagaagagagtgacaagtgggtggaacccagagagcagccggtataggaggggcttacaaagatggtggacatggggaggagyagccagaaagggaagaggaaagccatagkgagtgttgttatggaaatccagaggagagaggcttagaaaggaaagagtgaacaaatgctgcagagaggtaaagcaatccagagggttgcacagattttgcagttgacttgtattctaaaattcaactctttgctcatggaatcctttccttctaatgtgcaaagatacattataaaagtcacagagggccaggcgctgtggctcatacctgtaatcccagcactttgggaggccaaggcgggcagatcacaargtcagaagatcgagaccatcctggctaacatggtgaaaccgcgtctctactaaaaaatagaaaaaattagctgggcatggtggtgggcgcctgtattcccaactactagagaggctgaggtaggagaatggcgtgaacctgggaggcagagcttgcagtgagccgagatcgcaccactgcactccagcctgggcgacagagtgagactccatctcaaaaaaaaaagaaatgaaaagaaaaaaaaaatgtcacagaggttgccataatgggtgttagcaggcctgagagcttagcttcaccttaggttctacttgaagtctccacggacccttgagaaaatcttttcaccattttgcattgcatagttcatctatgaggcagagataggtaagaaacaatgctcacactcaatataaagagtaaaatacctctgtgaaaggcttttaattagaatagtagctaattttattttagtacttttccatgtgccactcactgtgctatgtaggttaactcattaaatctttataacagccttatgaagcggatattactatatcaccattttacagatgagaaaactgaggtttagtgacttgctcataatcatactgctgaaatagggctagagtttgtctccattgttgagcctttcctctcagccttcacaaatccctggctgtagtagggaaatggcccaaacaatatccccagttatgttaccaatagtgtactgcacagctaggtataatgaaagcaatgattacttatgacctgctagaaaatatacaccatttttttctggttataccaaatctatttaggtaccaagttgttggcagaaagaattaaaattctaagtaatattcccaacaatagagaagcagacaaatattcaaagtaatgatgcaggaagaatttaacagggaatatcatcaaactatwacaatttagaaagaaacaagcatttctgggccatgacagaaataaaattttaggaaaagagaaattgctgttctgttatttacaatgaatgtaaatcctgaagataaggaatgaaaagagatgtggaaatcactaaattgataattgagtttgtgactgagcaagaaaggcagggaagagagaaaaaactgaattaaaggcggagtttgcatatctgcaaaggatagaaatagtgcaacagacctttcaaggcaaacctaaacttaattattttttcaataaaaaataatgtgtttaataatagcttactgctttgcagactggtgggcatatttagcaaagcaataaaatgactgtcttcattgttgttgttggagatatgtacgtasagaagaaaagctattgaaaggactttttaaagcaaagaagtgggggtgcttagaaaaacagggagcaataataccatgcctatcctgtggtcctactgacctaatggggtggaaaggggatagagagagaagattagtaacatatctgggcatctagtaaaaatatcccagtgacttcatccaaacatttgtgtaaacatcacctcatcagtcccagagagttctacaggaaacaaatctaaatgctcctctgctgttctaaacatagccagtcagccggcatatgtctagtctgtaaataccccgtcttacttggaagtctttattttaatatttctctcttaaagaggttgcccagtgcatgctatctttgttgaggatatctgccttaagatctgacccatagactacttattaaataatttttaaacaaaagcaaacaaataagacaacctatctctactatcgcagtctcttgtaagctctttttgcaacaagaagatgtactaattgctgaaagcttgccagggtcaagttactaaatattgctacaagtactataaaccaataaagtagttagctaatgatttttctttgacacataacaacagaatttgcaaaaagaatttatttgcctcatataaaatattatttttcagaaaattcaataagcaaaaaagtttaaaaaattaaaatcatgttttagtaggaagttttccaatatgctcattcwtggattaaatgtatgacaatgaaatagctgatatgagtgggtagactatattgtagatttaagtttttgttgaaattctaaactttcctttagmctgatttctttaagcctattaagaacatcctaatttccccaattattggwttactgtactacttaaagttaaatatcttattttttcctaacatttaaaaatattttccattgctattattacatataccaagttattcttatgggcatcttaatgactattagtgcatattggcaataatcataacagttgaataccttccacaggtgttsaataccttccacaggtgttcaacacccaggtactaaccaaacttggcatctgatgaagttctttctattagggagataattttacaacacatctaactattcatgtgttttgaaatatgctataatgatgtttgaacaatgaagaggaaaattagatgataccaaagagcctgtgaacctgtagcttggctatcttgttcttcagcagttcggagggtctgcaaaaaggagatgcatacctaatgatatggggagaagggatgtagttcatacgttcttataaaataagctttgtagttcaggtgttaaacttaataaataggtagatccattaaatttttattgggaaaaataggtacactggtacctcccttmgtcttttgaaattatggtattttcctcatatttcaattgaagttcattaaaaataaatcaaacctggatgtgtgtcagggctgaatgtagaaatgtttttcattcattgctatatccatcaataactagaacacaggcttggaatgtagtagtcatcagtaaatattacattaagcaattaatttagcaaaattactaaatctagaaaaaccaatctttaaaattagatatttcagttgctgtggaagtataaaaaagtacatactttagacaaaaagggccctctaagggccaattaagtcctatcacaaagaccacgacttgctccgcttgttaaggcagagttaatcacccctgtgctcctactacatttaaaaatattcctttattaaagtgcatgtcaccttctataggtgacatatatatacatatagcagatctatatggtctgcttccctgctagactgcagcagcctcaaggacaagaagcatgttttatttgtctttgtattcccaacacttagtagtcttcataaatgtttgctgaacaaatgtgtaaagttggtgttgctataattctgatatagcttgtatattattacaaataaataattaaatacatgctagaataacattcatatttttttcacaggtgaagatggcgatgtgatttgtttgaattcagatgacattatgccagttgctttaatggaaacgaagaaccgagaagggttaaactatatggtacttgctacagaatgtggccaaggtgaagaaaagtctgagggtcctctaggctcccaggaatctgaatcttgtggtctgaggaaagaagagaaggaaccacatgcagacaaagatttctgccaagaaaaacaagtggcttactgcccttctggcargcctgaaggcctgaactatgcctgtctcactcacagtggatatggagatgggtctgattaatagcgttgtttgggaaatagagagttgagataaacactctcattcagtagttactgaaagaaaactctgctagaatgataaatgtcatggtggtctataactccaaataaacaatgcaacgttccygatttctaatcttggttctgagagccatttggtttcagttgtagcaatccccataccagctgcctgactttcagtagaattatgagatgaacactaagcatgtggaaagcttaggaagactcagaagtctggaagggaaacrctgctctcccttctcccttgaggtgctttaggctcttacccacctttcagtttgggctgtaataaaaatatcttggccacatgtttagagacagaataggtgtgttcagcgatataaagaagaggctaaggagtaggctcaggggggtcaactgaactacagataatctcaaatgggaccaaggaaatgagaaataatttcacacatacagaagaaaccagcacctgtgacttgagaaatcacttggaaagctgttactgcaatgatatatatattatctttttttaatttttttttttttttttgagacgaagtcttgctctgttgcccaggctggagttcaatggcacgatctcggcactgcaaactccacctcctgggttcaagcaattctcgtgcctcagcctcctaagtagctgggattacaggcgtgtgccaccacgcccggctaatttttgtatttttagtagagatgaggtttcaccatattggccaggctggtctagaactcctgacctcgggatccacctgccttggcctcccaaagtgctggattacaggtgtgagccaccatgcctagccgatatatattgtctttaatcactactgtaaaatattttgtagttttgaggcttacaacagtagattcagtcatgttgaaaataagactgtgaagatcttttaagtcctgaagttttgcattctgtaatcttcagttgtataaaatcactctgacttgtgtgctattatggaaattaactagtataaagattgctatttgccatatctattttatgtataaaatacttaagattacattttgtatcaaattatgcttaaaattaaatataaatgattatacaatgttaattcaagctgtgtgatttttaacaaccatatgaaaaaataaatacctaaatgagaactattatataaaaaagctcttcagagaaacaccttaacttaaaaccaatatatacattttgcagttgtccatttaaatcttaaagccacaattgctctaacagcaacaccagtgaagccattctgtgtgttattcagttgcartattcaggaaatttgctagatatagagaagaacattttgattatagcatttgctaaaatctgctgtggaagaagatcatgtatccacttccaccttggatagtttagttaatcttttaatttgcctactacctgagagcctgcacagatgattggcaaggaacacagagaagtgaatgtgttagttctatggtgaacagcccccaagttaaggtccaggatttgtggtcactctgccacatctgatattctgctgaataaggcaggatattttgtctctgatcttctcatcgtctaatgggcatttgccattctttttgttatgccatgatatgaagccccttcctgtgctgggtaattcctctgcctttataatctgggtgggaactgtgttccattcgctcccccagtgtctcttgcagtaagaaggcaggcatgtgacccagccctcaccactaagacccacccacccacctgcgccaggcttctaattgagacctagggatgcaaagaatcagagaccacgggaagtcttctctggtgatggtgccaactgcaatagtctgtgtgttagtccattttcatactgctatgaagaaatacctgagactgggtaatttataaagaaaaagagatttaatggaatcacagttccacatggctggtgaggcctcacaatcatggtggaagatgaaggaggagtaaaggcatgtcttacatggcagcaggcaagagagcatgtgcaagggaactgccctttataaaaccagcagatctcctgagacttactcactatcacaagaacagcatgagaaaatccaccatgactcaattacttcccactgggtccctcccacatacattgggattatgacagctacaattcaagataagatttgggtggggacacagccaacccatatcaatctggctcctggcacaaaggggacactggtgctagaggtggcatcragagtccaaggccaggagagtcagcagagctagtctagagcctggtgcctctgatagtttgggcagccaggctagacccgttctgctgtctgctctcaagtcttctccaaggttctgagagttatcyccatatccctttaataaacacttatcttttaaaccagccagagtcagtttctgttgcttgcagtcaggtttttgctctgacagtggcatggacctttaactctggaagatacaaaaagacatcagaagtgtatagaagaattagatttgccgtatagtacatttgcattacaatttgggcaatagagaatgtataggatatctgaggggaacagcctacaaaactttcatgtttcagctaagaaataagtgcaaattagcagtattttttataattcaagataaataatagtggtagaaatatttaattcaaaataaaatagtggctaaaaatgtcatgtgtaaaatggattatagataaaaataatttgataaagtatagttagttggttaattctgaaattgtagtactacaattggaagttaattctagaaaaaatagatcttataatcaaaaggaaaaaattgacagtggctaaaaacggctcttgtttaaatatattattcacaaaaaattagcataagaacaaaatcttattgatttttttttttttttttgagacggagttttgttcttgttgcccaggctgaagtgcaatggcatgatcttggctcactgctacctccgcctcccaggttcaagcgattctctcctgtctcagcctcccgagtggctgggattacaggcgcccactgccacgcctggcaattttgtattcttagtagagatggggtttctccatgttgatcaggctggtctcaaaatgccagcctcaggtgatctgcctgccgtggcctcccaaaagtgctgggattacaggcgtgagccactgcaccctgctgatattttttttaaatctgcaaatgtgacctaggaagacttgagagaagtaataactcacaaagacagaagctacaactggaaagagtttatatgaaaaagctgatcaatgaatctaaccttcatttaaaattgttcaaggaaaagaaataatccataagaaaaatatttaaataagttgaaatgcgatatagggttggaagcaaatgctatgttgtttatggtttaacactgccaattgaggaaatatttatctagataaaataaatatgttgatataattctgattaaaatggtttactccaaatgttcttgagaaaaagtctgtttctgggcccagatgcactctacatttcttacctatgttggctttcactttcctattggrctctcttggcctattcttttctgcttactaaatctcactcaacttttataaccagctcatattccaactctttggaaargcctgcccctaaccctgttccttcccagaattacttttgcccttactgtctttaaatctcattggcagtaactgcaagttttttccattctatttctatgcattttacctactcaaataaattgcaagctttatgaagataggatggtgtcttttattccttyatatagtctccatgccaaagtaggtatttgtttttaatggattgataaatagattttctcatcatctacttccagcctattacaggacaagtccttgcttatggctcataccagggataccagaaaattgatctaatgccactggggactcatgaggattctttcaataatgagttatcagttgagacctagacagattatagaagttgggsaactgccttgaagttaatatcagacataagtgaggaccaaacttcttcttgaagcccttgaagtaatagtgaacatatgctaaaggaaaaaaacatttatttttagcattctcagtttctgccctatcccaaacccaccttttaccctcagaatagcttctatgaatgtaggatggatgttagggtgtccttgacttctctttgatactccttggtaaaargaagcctgtccaactttccttttggcagctggtcagggttacagggagcctgaatcagatgacctatcctgattctttcgggcttcttcacatacaaccagaagaattaaggggccgaaatatactccccaaacactactgtgaataatttaggatgtttccttccagttttttctccccaataggagcttattttcatggctggaatagttgtagttgtacctctcctagtttttttcacttaacattattacataagctttacctctaattattaaaaatattttgggagggttcctgatggctgcataaaatcacttagggtggatctattagagtttacccctcctttgtagatcttcacattcattcatttactcatttaatagagtgcctaaaatgcagaaagtattgttacaggtgctaaaaatagagcattaaacaaagcaaagtctctgccttgatggaggttacattccagcattgtagttggargaggagacataataaataaaaaatatacatataggtgaggagcaaactcagcattctatagtgctgcagagcttgagacgtttaagtgctcattcaaggtgggtctgttgagaaaacctggtgccctgaaacacagaataaaggkatttagataaatacctcaaagattttggctcagcagacccttctgatccctcagagcttgtagaggtggcccacccctccaaagtaagagccagcactttctctgtagaggaaaatgtgacagaggcctcttctcaaccaggcaactgatgtgccctcaggaaccacattcatctttcctgacagccaggttgataactatgctggataaatcccagtataacttgactagggatatgctggatctgataaggaaggaaagagattacatcccataggagctccaagaattagctaacatgcactggcaggggtgggggggataatgctggcattgcattctgaaggtcaaggggatgggaaggtaagactgggtaagcaagaattcattcactgggtgagattttcctgggacatgagatttaacattctggaaaagaccaatggagatgaggcaaatttgtggctagggtggcttcagaagccaggagacaacaaaggccctttctgagtttccctgtcaaaaggtagagtaaggaattaaaaggctaaggastgggaatgctgaagtggacatataatgtgaagccagaagacccaccagaggatgcagcattcatcaaggtcatcaggaatgtgctgatgaaaggagcctcacaagcatcacgaagaagctcagtgatggtctcctctgcaggcagagcttttggcaggagaggcagatccagagctgagcttgttaacatccatggtcacaatgcgggcctaaagtaatagaggccagatggctgcacttgaccaccagaagccagggacccttatcactaatgacagagaggaagccaaaggggcttgaccatagatattgtggagatagttaataaagcatgtattagtttcttctcacactgctgtgaagaaatacctgagactgggtaatttataaaggaaagaggtttaattgactcacagttctgcagagctggggaggcctcaggaaacttaacaatcatggcagaagtggaaacaaacatgtccttcttcacacaatggcaggaaggagaagcgctgagcaaaggggaaaagccccttataaaaccatcagatctcgtgagaactcactcactatcacgagaacagcattagggtaaccattcccatgactcaattacttcccaccaagtccctcccatgacacatggggattatgggaactac

SEQ ID NO: 1609 - DNA, 16983 bp, Homo sapiens
cgggtgccagtgatgtgcctggtttacatgtaaagcagcccaggtagtttgtgatttcacagcttgtaatgtagaagaaaggaactaacgatggagcagcaactgcaagccagaccttgctgaaagtttttgggttttttttgtcttttttgctgctgaatgtttttaggtacgttgttcattgaaccttctcttgagctctgaggatggtattagtagtcctgttttatagatgagacaggctcaaaagtcaagtcctttgccaaggtcacgtggtagataaatggaggaatacgttatctccaagccgtgccccttttctgcaccatgctgccccacctgacagcctagtcatggcttcaactaggactgtttcctagagggggccagctttggactcggtctgctctcagccttgttaaagtgtttgccgccaagtggtgatggtaagtgggaggttgatggggcayggcactgaaggtctcatttctttccctagaaaacagtccgggataaagaactggagggcctgcaggtaaaaatccaacggctggagaagctgtgccgggcactgcagacagagcgcaatgacctgaacaagagggtacaggacctgagtgctggtggccagggctccctcactgacagtggccctgagaggaggccagaggggcctggggctcaagcacccagstcccccagggtcacagaagcgccttgctacccaggagcaccgagcacagaagcatcaggccagactgggcctcaagagcccacctccgccagggcctagagagcctggtgttgggtcatgctgggaagggagcggcagcccagccaggcctggcccataaaaggctcccatgctgagcagcccattgctgaagccaggatgttctgacctggctggcatctggcacttgcaattttggattttgtgggtcagttttacgtacatagggcattttgcaaggccttgcaaatgcatttatacctgtaagtgtacagtgggcttgcattggggatgggggtgtgtacagatgaagtcagtggcttgtctgtgagctgaagagtcttgagaggggctgtcatctgtagctgccatcacagtgagttggcagaagtgacttgagcatttctctgtctgatttgaggctcagacccctccctgcccttcagagctcaagacaagtaatacacccaggtcttgactgcatttgtcttgtgagcagggcttgcttggtcagctcaggccctcctagctgctctggaggctcctttgattctctagacctggaaaaggtgtccctaggcagagccctggcagggcgctcagagctggggatttcctgcctggaacaagggacctggagaatgtttttgcgtgggatgatgtgctggtcaggagccccttgggcatcgcttcccctgccctttggtagtgccaggaccaggccaatgatgcttctcagtagccttatcattcacaggtgcctctctagcctgcacaaatgattgacaagagatcacccaaaggattatttctgaaggtgtttttttctttatttctttttctttttttttttttttctttttcttttttttttgcacatgacagtgtttgtattgaggaccttccaaggaaragggatgctgtagcagtggtgcctgggtgcctggcctccagtgtcccacctccttcaccaccccacttggctcctttgccatcttgatgctgaggtttcctgtttggtgagatcaggttgtttgtggtaaaagaaaggaaagggcttctgatggctttgccacaagcttacctgtgggtttcagtcctgagaggccaccaccagttcccatcagcactgtctccatgcagcagttgctgggtcccatgtccagctgcctctttggcttcatgggtttttctgcttcctgcccccacccccacatgtgcaatcctcaagatttgtcctgattctatttcctggcacctccctgcctgtccttggggattctacttcttcctgtgtgggagcccatagctgttgtctaacaggtaagaaatgaaattgaactattgactgggccccagaaatccataaaatggctgcagacagttgtttctgtgtcctgttctacccccactccagtacataactactatgtactgtgtagagccattctatatgctgaatgttctgctgttgcaaacttgccagggtattagccagtgtttgtgccaagcagttttctgggacaacagaatgactcagaccaagatggataggatggttagggctttgcttcttgctgtttttctttgaagctagttcattgtcctgcaggtmccttcatcttccatacctagcccactcttttagcccttaccttaaatctctcagataagttggttcacaaagaatgttaagtactgaatcatgtgtgactgagaccagagatggcaaatgaatggcacaccatttctccttctcctgccccagggcaggtaccactgatctgcatcagagttgcctgctattctctggtgtatccttcacatctaggtgccctcaagcagctgtgtgagtgttgagatctctgccatctctggctgagatactgctgtcctgtgaagtgtttcccatgacctttttcttcccctttgaatccctctgtctggagtagtccttgcctcttcctgctccagtagggccttttccctaccccagcccctgtgccaggctaagctggtacaagagctgccaacctcacagagtgtttgctaggcgagagaggtgcagggaagaggcagaggtatgcaccttcccccttgaagagaggggaaaggcctacagtggcccacataattgcctgactcacacttcagctacctcttaatgcctgtggaggractggagctgctggatcccagtgtggtggtgtaggaggccacagtgagcaggtggccccagctgggtttcccaggtcaggaatrtgggccccaggcaaggtgcagcctttgctcacagctccatccatgtctagaccttcaggccagtctgcagatgaggttccctacctttttcttctcttcattgaccaaatcaaccaatcactacagctgctctgcttctgctttccaaagtagcccaggtcctgggccagatgcaggggaggtgcctatccatgagtgaaggccagtgtcttcctcacctgggtgggtcccacacttgtgacctcagttttaggaccaagatctgtgttggtttcttagattgctagcttttcctccaggggaccacagcaggtgaagctcaagagcgcatggctctgctaatagtaaattgttttcagggccttgtccagctgagagcttcatgtccaccagattctgagaggtgtcagcagcactttttttttttatttgttgtttgttttccatgaggttatyggaccatgggctgagctcaggcactttctgtaggagactgttatttctgtaaagatggttatttaaccctcctccaccccatcacggtggccctgagggctgacccggaggccagtggagctgccwggtgtccacgggggagggccaaggcctgctgagctgattctccagctgctgccccakcctttccgccttgcacagcacagaggtggtcaccccagggacagccaggcacctgctcctcttgcccttcctgggggaagggagckgccttctgtccctgtaactgctttccttatggcccagcccggccactcagacttgtttgaagctgcactggcagcttttttgtctcctttgggtattcacaacagccagggacttgattttgatgtattttaaaccacattaaataaagagtctgttgccttacttgtttctctcctgacctgtgtattcctttgtttctggatctgatccattcagccccttccatcatcactgacttgttcaggtctgctgcagagcgcccatggtggttccctggtatcttacatattccacagtgtctttgagcagtcgccacagcctcaggatgctggcatattcacttgagctgcctgagtggagcccttggcaaagttggcaagacccttgcctcagagaggatcacacacacacaaaaaagttttccctgacctgggggctcacaggctagtgaagggaaaaggtacttttagctatagacaggtcaatggtgctgagagcagagaggaggcccctgcccccttcagcaaggtgagggggtgatacctggaatggccttctgaaccacagggcaggtagaagatgaacgtcatttagtgattaaatggtacagctgggaagcaggtccatgggactgggagagggggtgaggctgggcccagagtctgggtaccaggttaaggaatgtgggctagatccagagggcagggggggcaactgaaggtgtttcaataggaaattgataggctccagcagtaaggcaaaaggcatggagccaggcataggccatttgaggcccaggttaagaggggtggacactcatcactgctatttgggtctgagctgtgggtaggctcctatagccctggcctgcccaagggaattcacaggggcctctaattgtatgcattccttaaggagagcacattctctgttcagtttttacaccccccatttacccacctcaagcatgggactcctatatgggagacatgctgctggtggcctcacccagcaccctgttctctctgggtcctgggttggtcaggcacaaaggatgatatgtgctgaatgcccaggaaatggcagagacaacccacctgcccttccctccaggcctccacaaatagatgtgcccacaatgactgtgacagtcccagcagagcctctgacccttctagctgggtcctgatacatgttttccatgctggccatgttatttctagtcgcagatcctctggagggtgtggggggggtgccgccccaactcttggagattccaagcaaagcagctctgagaataatgaggtttctgaccccccagtgaagcagctgaggatgggaaccacaggggtgctccctctgtcagcagcattaccactgtctactctagcagctccggtggggaaggagagggatttctgttgtccccagtctgggcccctggttattgaaaaagttcggaattactctttacccttgtggagtgttctgagtgttggaagtacccaggaagaagccctgagcaggtgccctcaggagcagtgcccatggctccccacatcagccaagaggcccaaccccagraagccactcctgcccggggatggggaaggtgggctgggtggctgtgtgcactgccctgggccagctcacttgagcctgctgagccgcctggccaaacatgagcctctctcctgttgtatcagatgctgttctggggacctgcgccaggagcctctgccagggctttaaatagctgcccccattgatctggctgcaggcagcagcagtcacactgggtcagcctccatcaggtgctcaggtttccctgaggactggagtcaggtgccagggaatcgcgtggtctaccttatgacctggtgctccccacacctgtctcctaggcctggggggtggggaggactcctgtcacttcatctgcggcaaaatacagcccccaccacttaccagagaaaactgtctggcattgtagagagaggggttttgccctcaaaagactgttgcttactttcagtagaatggggaatgacactggtatcttccttaagggttgttatggggatgaaatgtatgtaaagtgctcaatagggcactggactcactccattgatggctgtctttgctcgaagtgtcttcctgatgctgctgctgttgctgcttgtgcttcttctgtgcttacattctctctctctcactcactcactctgtctctcctctcccccgccccaccccctttctgacaaagccaccaccattttgtaaggaactgtagcttctctctgaaactgccgggaaagggaaaatctttttaaaatagacatcacacaaccaacagggtcccctaggttcaggcggggaggtgaggtcgagtgagaggaactgcttagcatacgcggggatgctcctcccatctcaccccaccgcgctaaggagaaggtcactttctctttaaatgcaaatgaactccctccagcttagctttcacccggtggtgttcccgggaggagagggcggagggcggagggaacttgcaccgaagcatcactcgagaccccaaacctccaggtcagtagccccctgagggagtgagggcgggggcggaatgacgcgggtctgacgctctgtcttcgagcgcggctgcggagctgagcgatgagtttggcacatggctttggagcccgggcttgggaaatagatccccggtcgccccagccgctcctggggagcacaggctccggctccagttcttctatcaggtccctaattgggtcaagctgctgcacggagaggcagaggatgcgctcctatctcccctccccacacccgcagaccccgtcagtggcagccagctatgtgtcagtgtaaatgcttaagcgccacccacccccccaacccccccagtcccagaattcgaagttaggctcggtagcagcagcctggaatgagacccccagaggagggaaccccagccgaccggaggcttggggggcgctgctggaccggggacctcggagcagcccagccacaggcgcagcctttgtcggaggcccaggcagccagcggccaaccacccagtccaccctggctgcagctgaagcccagcagggactttccgactgggaaaaatgaagcagctgaaagcacacccgcgggacctatagggagtccctaatattttcggttgggggtgggtggaagtggagggatgccggtgtctatgtgggggaaacccacaatgaaccctgccctgtatgctgcggcttctcctacaattacccacacgctggggctttcccaggcgcccctacctgcaccttgtccccctcccatgctgacagggtttgttagcatctgcttaggcccctgataaatagaatagggtttagttaagacatccctaatcttcggctgggcttctgcagctcacctccgtcttgtctcccactacatttcctctgccagccccgccccccagccaccgtgacaggaagccccagtagcgccaagatagttgtgactggtcccaccctttcaggaggggcmtargttttcaggcagaaggggaattaggttgggccttakaaggtccttcaagtgtacatccacgatcccagcagcagacactggcatctggctctgcccctaccgtatagatgaggtgacaagctggaaggtcccagggcccttccttggtgcagctctcagggatttctgggtgaagggctaactttgcccctggctatctttgtggggttgcttccctcctaggcctgaggcccagccagcgcccaatggatgacaaaaagaagaaacggagtcccaagccctgcctggcccagccagcccaggccccaggcacactayggagggtccctgtgcctaccagccacagcggctccttggccctaggacttcctcatctgccatcccccaagcagcgggccaagttcaagaggtgggtacagaagggaaggaaaggaggagggaccccaactctgggttgcactgtagagaggaaggcaaggggggcctccgcctttagttcctaagcaataattgatgcctttctggagcagacccctgagaactcagagctcactcagacccagtccctaccctcaactgtgtggcaaaaaggccaggtgggtcactgggatcacatagcgtgaggattcgcctcagaggagggagtgagcaactctgcaagaaagtgaatgttccacgctgagaggcttacctggtataaatatggaagaaagctattacctgaaaggtttcaggaaccacaggtggtttgggggccctggagtatcagggaacaggaaatggtgaggaaatacctgggggcacaatttgaattctctgttgaattttttttatgattgggagtttgcatgctgccttataatgtgtccatgtttgttccccactaaatacaatgtattctttctccagttgctccagataagaccactgtgtttccccctggttttgcacaccacttgcctaaggggcatgaagctcaaggctgtggggagagtagcaggaaaggcaactgggaaggcaggagggccaggctggcaggggcattcaattttatcctgagagcagtggaaattttaagacagtttttttggtttattggtttggctttgttttctatgtatttttgtttttgtttaraagagtttttaaatagaagagggttggctgggcatggtggctcagcctataatcccagcacttggggacgctgaggcaggcagatcacctgaggtcagaagtttgagaccagcttggtcaacatggtgaaacctcatctctgttaaaaatacaaaagttagccaggcgtgatggtgggtgcctataatcccagcaacttgggaggctgaggcacaagaatcacttgaacctggaaggcagaggttgcagtgaaccgagattgtgccactgcactccagcctgtgtgacagtgagactctgtctcaaacaaaaaaaaaawtttttttttaattaaaaaaaaagaagagggctaggggcagtggctcaggcctgtaatcctagcactgtggaaggccaagacaggcagatgacctgaggtcaggagttcaagaccagcctggccaacacggtgaaaccccaactctactaaaagtaaaaaaaattagcagggcatagtggcaggcgcccataatgccagcaacttgggaggctgaggcaagagaatcacttgaacccaggaggcgaggttgcagtgagccgagatcacaccactgcactccagcctgggcaacagagcgagactctgtctcaaaaaacaaaaaaaaagaagaggggcagaaagatattttgggaggaggtaagacagccctggtggcaataagggagtagctgtctctatatacgctgaagactagggaggataagtgactcattcagggtcataaaacaaatgagtgaggcactcagacaggaacccagggaccccctttcaggcactgctctggctgtgttattagcagaaaagacttmtttttgacctcttcacgcctcctcaccccttcccagtgcccaaggggaaccataaagttacccatttatgctagtaagtagatgggcagatgagttagtgcagatagacagataaactggtgcataggcagatggcacaaaagatcrggaggtgcctgactgccccctaccctgtgatcatggtcatgtccaccccacccagagtaggcaaagagaagtgccgcccagtcctggctggaggtggaagcggctctgcaggcacgcccctgcagcactccttcctgaccgaggtgactgatgtctatgagatggaggggggactcctgaacctgctcaatgatttccactctggccggctgcaggccttcggtgagtcctgggggctggtttcagcgggtgtgtggatagggctgtagggcccagtccatggggcatggctgggaccatggttccagggttccagggttccaggactctttcccagggttcagacaggggyttcgttccagggaaggaatgctcctttgagcagctggagcacgttcgggagatgcaggagaagctagcccggctgcacttcagcctggatgtgtgtggggaggaggaggacgatgaagaggaagaggatggggtcactgarrggctgccagaggagcagaagaagacaatggctgaccgtaacctggaccagctgcttagcaatgtgggttcatgtctgggtgctttggttcctgggggcatgaggggtggagaaggtacatactcccaaagccattcctgggccctgggtgaaaaggtgggagtgcatggatccaagagctctgggcccctcaacctccccagaagatagcccccagagcattggggatttggcctggttcccctcctaacagaagcctccctttttctctttgttggcagctggaagacctcagtaattctatgtatcctttccaaggaacccgtctatgtgtgtgtgttcctgagaggtcagtttcctcctctccagccctccaggagtattcacacacaaccaacttccccacctcttgcagtcctgtcagatttagccacagactgcccaaacccaggtacaggaatttagaatttccccaaaattagaagaaaagtggttgtaggggatgttttactactgatcaaaatctttgtgagtactttagctgacatcaatcatagcaaagcttgtccgatgtcctcctatcctttcagcattgaacaattatttttactaatttacactaccacctcacctggtcctcagtcagaaacagcgcgagtgcgcgcgcacacaccccagtgtgtctgacctgcacgatctggatgaagagagagggggtgmgagagggcaggcggggactgcaacctcagtccacagacggcccgagaccctcgtccccggccctttgcacaggtgagggaactaaacctgtgcaagatgggagaccggggtgggaggaaggactggtccaaagcgccacgatccttgacgggcacagccagaagctgcacctggccgagaacgccgagcctgaggagcagtccgctgcgtaggcgtcccacgcaggcccacactgcccctctcattytcttcaaactgtgactttttacagactcgggcgggtgttctgcggccccccaggtgctatgggggaggggggcgttgaatggaattaaaccagaaagaaagcaagcggctccgtgtcctgcttcccctccttgcgcctttcctccyggtctccgcggagacagccctcggttatggaggtmccgcctgcrggattggagtgccccttgcggctgtgggaggggcagtcgggggctggggggacgcaggtacgcctgtcgccaggacgcctctaccctggacggtaggaggttgccgtgggaacggctggggcaaagcccacgcccgcgcatgctcaggagcgacgccgaycaatgacgtacttcgcaggcgcgcgggcgggcctggcagttggcgcccatggagccagagctgctggttcggaaggtgtctgcattgcaggtgcgggggcgggcgcggggttcacaggatttttcctttagggaaatcatggggtctcgtacctggacctcccagcgagatgctaccacgttcagtcccctaactgcgcgccaacctctggagataccggctgtccccaaccgcgctgaggaaagctgggacccacggactccctgccctgcgcgtccccactcccaccacacgctcgcgccggatcagggaaacgggaagagccttaaggcgaggaggggcatccagtctggcatcgtccctcgagccccccggagccctagcgcacagcccacctatcctttccccgccgtcaggtcccctcttgcattcgccgggacgacctcttcaggacagtcctccgagatgccccctctcttaccgtgataagggacttctttcctctcgttctccataccaggcctgcgtccggggcttcttggtccgacgccagttccagagcctgcgagctgagtatgaggcgattgtacgagaggtcgagggcgacctgggcacgcttcagtggaccgagggccgcattcccaggccgcgattcctcccagaggtagaacacacctaggagagaagggaaggagggacttgggcagggtggaacccaccctwcccagtgataagcttttctcactggaagaggcagtagactcacctcctcacaccccactccttaaccctcaccaacttgtctgctagatcatggtgcccagatacttggaagggtttagccctggggctctcacatctctcttgtttctcagaaggcaaaatcccatcagacctggaaagcaggagacagggtagcaaatccagagcaggggctgtggaaccacttcccatgtgaagagtctgagggagaggccacctgggaggagatggtgctgaagaagtcaggagagagctcagcaaatcaaggaagcctctgcagagatcacagctcctggcttcagatgaagcagaacaggaaacccagccaagagaagaccagagacacgacaaggatggagaatccaggtacctctctgcaaagatcagggcaagcccctgaccctcactgtgcctcagcctcccatctgaagagtgaaaggcttgcgctagataagctgcatccctttcccgtcttccctctgccgggatagggccaccacatggttgggcagtgcaggggagggagtttccaaagtctaaggctaggccatttcccagggtctggtccctcaaggttttctccttcctttcttccctccttcacagaagccacagatcaaagactgccccacagccaacctcagcttcaagagcttcagtaccaccgcagccacttggccatggaattgctgtggctgcaacaggccatcaatagccgtaaggaggtaacactaacctggaactctttctgaacatttagggtcaagggtgggggttagggagagacswcctgccatgcccaagcaggcctgcttggtacaatgtatgttctctcccccaacagtacctacttcttaaacaaacactgagatccccagaggcgggcccgatcagagaggaaccccgcgtgtkcctagaacatggggaacaggcctrtgagagggaccagtcacaaccaagcgcaccactggaggaccagtcctacagasacaggaccactggagagctagaacaggaggatgactcctgtcacagggtcaaatcaccccacagatccccaggaagtttggccactacacaaaaaaacattgctggggctaagtgcagagaaccatgctacagcaagtctggaccaccgtcgtctataccatcaaacagccaggccttgggggacaggctcaccaaagggccagacgatrgaagacagacctttggagggacctgcctgctgcagatgaaaatcctggaggaccagacccccagaggtttaaaacctaggaaccattgtcccaggaagtccaggacacagctgtctgcactctatgaggactcaaatattaaggagatgtctcccagaaaactagaccacaaagagcctgactgccgaacagtcaggacacaagagttgggcctctcagaggaccacatcatctgggatggtaccttggggggkccagagcatagtgtcctcgatctctggaggactaaaccacccaaaggccaggcccccactgayagaagctccagagatggaacctccaatgagcctagtcatgaaggacagaaaaagcagaggactataccatggagatcaaagtcacctgagattctgtcttctacaaaggcaggctgtacaggagaggaacagtggaggggcaggccatggaaaacagaaccacctggctagaccctakgaagccaggagaggatcaggttccaaaggggaatgctatgaaagggcagtgagacaagacctcatcctacctccctgaccagctctggcttctgctcctgcccctggccattggtgactagtggggccaagagaagctggagcagagagctggcatgagtatagggaaggaggaaggacacattttcaatcctctgcctgtagctcaatccaaatttgtggataaggggccgggtgcagtggctcacacctgtaatcccagcactttgggaggccaaggtgagtggatcacctgaggtcagaagtttgagaccagcctgaccaacatggtgaaatgaaaccccatctcaactaaaaatataaaaattagccaggcgtggtggtgcatgcctgtagtcccagttactcgggaggctgagacaggagaatcgcttgaacccaggagatggagattgcagtaggccaagatgatgccactgcactccagcctgggctacagagcgagacacggtctcaaaaaacaaatgtgtggctaaggagttacctgggggaagtagaatgagaggtctgttgggaataaaggtttttcttagattctgagtctggctgctttcatttctgcttctggccaggacagattctgggccctgccgttcacttcctactggcatggggcattgaccccggagccagctgggagccatggcccaggaaaagatctagccatcctccttagggaacagctcccaaagctgatccccaattgagctcagccttgtgctttagagtggcaaggaggctctggagagtagggtaacacctatgtttaagtgtgatctccccagggcagatgggataaaaccctgaatgcagataaatgctcctgccacagtctccctctgccttcctgggtgagagggcaggactccacctctgattggcaatgttcccagcccttccttggttgcctggcaacaggtctgtttctctgactgaggatacactatggcaggtggcagtccagcagccaagagggtagtggtgtaccggaatggggacccattcttcccaggctcccagctggtggtgactcaacgccgcttccccaccatggaggccttcctctgcgaggtgacatcagctgtgcaggccccactggctgtgcgtgccctctacacaccttgtcatggccaccctgtcaccaacctggcagacttgaagaacagagggcagtatgtggccgctggatttgaacgattccacaagctccagtgagtgggctggggctggtcaaacagcctagcaagggaggtaacggcaagagcgtgtattcagtacctaccatgtatgtaccagcatgttactggtacttactgaactctatgtagggggggtggttttgcctccattagaaagggaaaacagacagaaaacctgcctaaaagtacataacaaatagttgaactgaaattcaaatagaattctgtgtgttactaatgtttatgcccatcacagccaagatcagcctgtgggaagaccactctcccacagggtgagcccctttttccaaaagctcttcttgcttggaccccctatcactgaacactctaaatccacccatccattcctccccactgtgcataggcatcccagactctcccgttaggctagggccatcctctgttgcaggaggagactgtctcccagggtgggagaagaatttgagtacctgagtctctgactcatgtctggcttccaggtcctactcttagctctcagctgaggttgcttactataatgtaaggatcaagagggagtaagtggctgggcacggtggttcacgcctgtaatcctaacactttgggaggccaaggcgggtggatcacctgaggtcaggtgttcgagaccagcctggccaacatggcgaaactctgtctctactaaaaatacaaaaattggccaggcacgatggctcacacctgtaatcccggcactttggaaggccaaggcgggcagatcacctgaggtcaggagctcaagaccagcctgaccaacatggagaaaccccatctctactaaaactacaacattagctgagcgtagtggcgcatgtctrtaatcccagctgctcgggtggctgaggcaggagaatcgcttgaacctggaggcagaggttgcagtgagccgagatcgtgccactgcactccagcctgggcaataagagtgaaactccatctaaaaaaaaaaaaaaaaaaaaaaatcagccaggcctggtagcacgtgcctataatcacagctactcaggaggctgaggcagaagaatygcttgaacccgtgaggcggaggttgcagtgagctgagatcgcacaactgcactccagcctgggggacagagtgagactctgtctcaaaaagaaaaaaaaagagaaaaaaagaaaaaaaaggccagaggagggaagctaggtagacttagaatctaggcttcattccttgtgtgactttgggcaagtcacttaatttcttggaatctcatacaaaatggagataaaacgacctatctcatgaatgagaatattcttgggatacagcaggatgcataatgcactagtttctagtttctcttgactttttttttttttgagacagggtcttgctctgtcacccaggccrgagtgcagtgcactggcgcgatcatggctcactgcagcctcgaactcctgagctcacgcaatcctcctgcctcagcctcccaagtagctggggccacaggtgcatgccaccatgcctggctaatttttttgttttttggtagcaatgaggttgcccaggctggtctcaaactcctgggctcaagtgatcctcctgcctcagcctcccaaagagctgggattacaggcgtgagctgccatgcccagccttcttgacctttaatctcatggttagtactgagaccccagtctggatttccagacttactcagcacttacccagacagcacttgagcactcaaggggtcctagggcaggttcagctgccaatatcttgtttctggactgagatgattgccactattccatggggagggatatctggtgagctgcgccccaacccaacactgacatctgccaggctattgaggcctcagtctccacaagatgacctgtgatctatctgtcctttcagctatttaccccatagagggaaggacccaggtgggaagagctgcagactacaagtgagtcccggggaacctgtgccccagcccctctgtcttcccactcctcctggaactgcccc

SEQ ID NO: 1610 - DNA, 109973 bp, Homo sapiens
attttaaaccctaatgtattttgaacactctcccattatgctattaaatatattttacaactgattttaatgataatattaaatataaatatgtgtgtgtatatatatayacacacacacacacacacacacacacacacacacacatctctataatttattgaaccaggtcacttaatgttggatattcacattgcattcaagttttcaataatgcaaataatgtcgcattgggcatcctaatatgaaaaatctttgtacacattcccttattattgccttaggatgaatttctagaagtagatgttctaggtctatgaggtttttagaagttttgaatatatattgcctgcttgctctgtataaaaattatacccagtataatcctaccagtagtatctgacatctatttttcgattgagctgctaaatgtagaggtcaatcctagaagcggtcgtcttggttaaggatgttttctcaaaagtcttgtgtctaattgggctagcaaatataaagtaagagtttatctgtcaccacaaaactgagcttagacctcaaagctaattgcttcttaagatgagaatttatttcccttctacctctcygacatgtttgggatatatgtatatacatatcagtttagctagagcaaaattcaaatatcaaagcactggaaaaacccataacagaaacmcaagtcaaataaccaaaaatctttccaagactctgcctggtggtattaaaaaaaaaagaaaaagaaaaagaaaaaaatatatatatttattgttacctttttgagactatttgcaaaatacagttttgttttgtttctctaagatcgagaaaagctmagctaattagtactcaagcactaaaaaataagtatcacgggaatggtttgattgcttttttttttttttttttcagttaaacaatttgtgtaccttaattttccctggcacttactaagttcagctagtgtgaaaaaaaaaaatccttcttagtaaatgaaatgttatgttatgtattgaagttctgtagcactttaaaattttaaatagtgccaaatttgacaatatgtaatatgccttgttcagttccacttaaaaaaattgctrgataatcctattgaacatttattgtctaaataatcaataactgtctgcattatagataaattaacctggaataattaaggtaaatgaaaatgtggattcacaaatacaaccgakttgaacatcagacaaaatcagattttaaccacccttttattatctcttatctctgtgcttaataagtacaattgttgctttaagtttagattagtccaattgactgcaactcagattaactttcatgttattttttgttttaatatgaaaaacaccaaaagcacattttgaggtccaaattaaaatagaggctgactcagttccatagagccggtctgcagaaggttttactggagatgagagatgtttttgctaaggttgtctatcataacttgtttattaaaaaaataaaaataaatgctaggagacattcaagctgtcttgattttcctctagttatttcctcaaaggttctttgttcacatggacatcactgtggcatttttttcaagcaaaatgaggtttaattttatagtatttatagaatagaagtctttgttatatcctatcctgctaccaacttttgtgttctatgcagtctctgcttctaaccagaggcccaaagcatgtgtttagaaactgatgtggggtatcaggatcaattagtccctctaggaattaaaagcaagcaattgaatgcctgttaacaatgactaacttgaaaaatattagcaattctaggcaggcccctttgctttctggacgaatgctctaggcaggcagcattcccaggaatattggtttccagctatgtagactgtccctcagttataaagttgcctccagggtctttgctatggctttgatttgaggatgattattattcttatggatgaaactttagttcttcctrgaaaggctttcagcgatttgcatgctctttccagctgccctccaaaccttgcccagccttatttttctccatcataaaatgggtacacaggtcatttttattggatagtttrgaggactaaattgaytgagatgtggtatatgaagtgctgatcttaatgtctagcccatacgtggtctgctgtatatgtcttgctttccacctttctttcttgagaagtttctgcatacatatattcttatgtagttattgtataaatagtgtatakggaaacattcccgaggttgtattttcctgttctttcttgatttagaaaactaaaactacagtaattttctgctgtgtgtaagagagaaaatgtgcttatgaactgtattcagcaaacttaaaatgttraagctcttggtcacctttttatgcccagtaatgatraactgtcaatttgcttacgttatttgggaatttactagcmacttgctgcagatatcacagtagacacatctcttataatatgtatgatctgaaagaagcagcagtctggtagttttttgtttgttttattaaaataaaaacttataaacttataaaaacaaatgaacaaatatatttatcctaatagctcttctgagtttgcttctgaaatcacctatattcaatatagacaacaaaaccarttgtttttgctattctctgaggtttttgagtttgagggtttgaatttgattctaatttttagaaatgggcagttgtctgaaatatggagggatgggaaaagcctttaatttggagtaggagtgaggaaggaaacccaaatgttatacacttcagtcaacgtatttgttagagaattgaattattctcttgaggttttttttttctctttgttagcaactcgagatagattctcctgcctctactaatattgaaaccctggaaaatgttaacagaactacagaggggagaaattatcaggatggaatgtaggctttgtgtagatatgcaacattgggggcactcagcagatgttaataaatacctctttctattgttgagaaaaaatgggtttgatttgggtgtgaactgcagtggtcaatgaaaggaacttgtatctcaccagggtgtgttttaagcagtagaagaggaatctgggtgttgatccaagtgacgttggtttttcataccaaattattccccatttttaagggttgtcatccccctaaaattgtaagctctcttgtgtccatgtcatatgctttcttggcagtccttgtgatacatggctgtgcacacagtaaggtttcaatagatccttgttgtctgaaaccagatatttgggaattttggagacagagttgacgaaggggtgaaaggagggctgtgggtagasagtaagagaaatagtcaaagcwgagagagaattaaatagagaaatggcccggggaaccagaaaaaaaccaaggttggtgagcaatgaaccatttaagttctcctgagaaaagaaaaaaaaaaaaactggactgaagaaaaaatttaatctgaagagttaattaacaaaattataaaacctctaaaacatccctctcattacagttgtagttttaagacaaaaaaaaaaaatatcgtggaaagcactctaatttgtcctaggaatctatttaattttgatttgtccagtaatagaaatttgagggggaaatgcaatatactgtagtttatgagtcttttaaatgttgttacttctgaattccatcctctttgtgatagtgagagtgaagaaaacacaagtgtatttgaaatcacttctggtttcagtgcatgtgctgatttgattttttagaagtagaattagatggcaaaaaataagaaaaccctaacaatacaatctgggcaggttagaatatcaaaaattataacragyctgttctaatgtaaagaacatctctaaaagatgtgaataggttttaaaaatatgatgaatatcyagcattggataaacacaaataaaggtatcagtgaatatcacaatggaagaatcacatgataataattaayaaacattgaytcttcttggccaggtgaccaatattatttcacagttgatcsttgagggcagagycaatgacctttgtcctgaattttaataatttactgaagttttacattaaatcagaatataattgggaagaaaattagtgtttctttgtggggagtrcagagtaatgccactaattgcttgtataaaarcattcccgaggttktattttcctgttctttcattagaaaattaaaactacagtaattttctgctgttyrtaaaagggaaaatgtgctggtgaactgtattcagcaaacttaaaatgtcaaagctcttggccacctttttatgcccagtaatgataaactgtcarcttccttacattatttgggaatttactagcaacttgttgcagctctcacagcacacaaatctcttataatatgtatggtctgaaagaagcagcagtctgctggtattttgtttcttttgttctttctttcactttaatatttgagcaatttaatatttaaaatatgtgttagggcaaataaccatgtttttctgtttaaggagatggacaatgaagaacagtgtaaattaacctcagtagaataatgctttacaaaytatatttaggtaactgggggattgttttcaggtaaattattatcaagtaaaagaattgagctgattctaaaagtatattgggtttaacattttatgaaaacatgtttattcacacagatacatacacgtgtacatctcctgggracttggaagggttaagtcagaccactgtcatgttacaggaagtgtttttccactgtgtccagtaccttgagtttgttatgtattcaatatgtagtgtcatcataaaacagttgcacctacctgcattagccctcattgtctcaaggkacaagctgaaaaataatagaaagtaaagctcaggaattgaatatttctgctaatagtgtgttggtatttttccctcagttcacagacattcttgatttcaaaacgcaaactacacaacccagggcactagggttggaattcaatgtttattcaaaaaggcaccctaaggcagttagggaggaaacgctacatgtatgaaaaataggagccgggaatcaaagctgatctgagcagagcagcagcgactgtatttactaacacttgttttctgggagcctatgagagaaatggaaataattagaaggaagctgaaaggatggggttttgtggcttgttctccttatatggagcaaagaaaactgcagcaactcttcgggagctggtattccctactgccatgggggcagccgaattctgggtggaggagtttgtttataccttaacacatacaggctattttgttgattaaacaagcaaaaaaaaaaaaaaaaaaaagccccgtttgcgctttcaaacactccctcaatgagaaaatgtctcataaaaatgcatcatgtgataagctcttgctttagtcccaaactgagcttgagtccacttggagatcttagaattaaagagttcttagggaatacacgttttagctaagaatatagttactctgtcatgaaacagggagctttgccacttgcttgttttggaaggaaaataaattaaaaaaagattgcaggggattttggttattatatggccagggctccgtttagagtctgtggcattcaaagctggctttaatcacagcatgatgcttgaagcctccaaaagtctaagtgtttcctttctttctttcttttctttttctttcttttttttttttttaaagcgttacttcactgaagcagagggctgcctttgagtgacgtcacgagttagagcagcaagctgcacaggggaagggaggctgggtgagtgacagcccagcctactttttaatagctttgtcatgtgactggggactgtagtaagacaggtgccttcagttcactctcagtaaggggctggttgcctgcatgagtgtgtgctctgtgtcactgtggattggagttgaaaaagcttgactggcgtcattcaggagctggatggcgtgggacatgtgcaaccaggactctgagtctgtatggagtgacatcgaggtgagctggggcagggctcggcgctgcagccacaactgacgcttccctcagatgctattattcctgtaaggggggatgggcttgggcaaagagaggagccaggaaagtagtccaggcaggagcttttagaagaatctcaatcttatcttaactccaataagtttgctattttaaggtggctctgagatggcttgagcaaatcaaagcttagctgctgtcatcagtatctgttgcagttagaaactctttccatgtgactttggcactgtttctactcatatgcaatatttatgctctaagatattgatatgaatcagaagctgaagtctttccagtggtgtttagtggcctggttggaaaaatgccatttctatttataataagacgaagataaaaatattaaaatggatgtgttcaaatatagtccgttttractctagtccggatttttcccccctctctctctgttcatcagacagagaacttacaaaatcctaaataatcctgctgggctattttagattgcttttcccacagaacacaaaacaacgatgctgcttcctttaaaactcctatacgtggttgaaagatttggccagcgaataaaaagaaacgcctggcagtgcaaggttttccgttcgcgtcggtggcagggaagccaatggttaaatcttcctgtaccacggagagctgcctgaagctgagagagaatagagtttatgcaggactgtgtgtggagctgctygctgctagtgtaaaaatagacagcaatacatcaattccacagtctctgctggctacaattcatacaggggggaaaataacgcaagcagtttcctcgtaatctctggagtctagtggggggacggaggacctcggcgtgtttgcattcagcacaatggaatgctctcggaaggaaagtttgggcaacttgggaaacaagcraaactttctgtggactctggtgagatggactcgaattgaattgcatggaggatcccagctgctaacaatgaatctggcaaaagactgcgagtgtttcctctgggtagctgggggcacgtagggtaagggggaggatcaagcccacacgtgatttgattaaataagatgtccatgtggtgcagcgatacacatctaaagtgaaaataatttggccaaggccgtctgtgaatgcatttttcctatctagcgaggcatgcccgggattcttaactctttgctgggtttgcaaatgttggctccatttgccctcccttgccttggtagatcgtatttgtggattgtaattgttatcttgttctgatttcttggtaaggcggaatagatatggataattcatatgccctgtagccattatgagtcagggttataagtggcttcaaagtcctaattgcctttgagtagccggagtgtcctgtgggtggttgtctggctggcactgtgggtctcagctgctgtagtttcatttttccatcatgtattattcctgatgctgttaggagttgattgaggaactagatcatatggaaataaggaagatttattttaatcattggaattcctgcagtcattttcaaataaacatcagaagcatttagaatagtggcctttaaatttttttcttaaggaggaaaggtcttggctacttgtccagccatggatagagtcgccagtcggctgagattggccagtcacttctctgttgcactayaggcagctagctgctagaagctttgcctacayrgcagcggctctgggaatcacctccgcctgtataaaatattacgagcagcaggtagcgttggcagttttcattttttgaatcattaatgtttgctgtcatcctaaaacgtattatgcccttttgcacataatgacagggtagtacattggttaatataggcctatatcactatagctacttggagtgccccgtgtttcacagtttaatgaaggtgatatacagtaaggttactaagattgatagagacaattcacatgacatacaccccactaasacygtcattctttactgcccctctctccaccccctttcccctgtcttaactaatttttttaagaacccagtttcttttttcattaatataattaatgtggccaagtccactccttcttctctctctctctttaaaatttaccatcaatggcacaaaaacctccaaaaggttaatggagaattatacttaattataatgattcattatcatcagtgcagttaagctaatttattgtctgctccttaactaagagaaaagtctgttggggtgaaataacatacaataattagccttttgtgtttagtgactgctttatcctcttaaatcttattataaaattgaggctacagttgtgaaatagctgtcatagttgcaaagaggcagtagaatgtgtctgtgtarttgcaataaagcacacctgttacagaggtatagggaaacagtaaatatcagcatgtcagatgaggacagttacagggcttggactgttaagtctggcattgtccaaaggccaaatataaattaataacaggaacacttgctaccactaatgtgttttagattagcaggataatgccacattcagaagcacagattttattagcatgtcaacattggcaagaacacatgcacttttctcaaccataacataaaagcaaaatgagagagagagagagarcgcacgagcgaacaagtgagaggaaggaaaggaatatgtaaatgacaagatagcaccaatacaacaaattgacctggtcttttcaatggttttcaaaagttatttaaaaatacatatttatggaaggttaaagggttatgagcaagtcatgccaaagagggcagttaaagagagggacaggaagaagttgtccacaaatcagtatgcyactttagcattccaaaacatggttggttcctaagtttcacaacaggaacttaagccatatgtagacagcctacattttcttgattatttttacttttgtgttgctatttttgttgttcatgttttttttttttttttttaaagactatgcccctataaaatcctagtgtatcttgcaccgttgaaaaagttctcccccatctctgaattggtgacattgaggaaaagttaagatagtgtgtttgggcttggaggatcagctgtgtgggcaagaatggagtctgggcagtgttacatccacaaccaaatatgagcattgtaccagaacgagatctcttcagcccagcctccagttacttatatgccttgtcaagtatactgatctgtaattttgggctaactcagataataaaaggaaagaccaataaaatgataaggaaagagttttgatggtgaggagggccctttctttgcattcccttgtccctgctgccagggatctcactggggtccaatggtcttagagaaggatggcaatgattttcagtctccccccatcctccccttaccaactgctgactccattacccagtacttacttctcagcgtgttgcttttgatcacgctgctgcatatgacctgtgtaatgtggcctgctaggaatccctgccagggataacaggggtgcttgagaaagaaaatctgcataaaacttatttcattcaaaatgtaaatgtcaaggagcatctttcattttatgcctaactgcagcctggatgtgaacaattccacagcatctctcctgaccttggaaggcagggccatgagggtgctgcgtcagtgtgtgcctcctgatttagacacccccacttacaggtggatgaagtccttactgttctggcaatgccagacccctgcaataggagttcctgcagtgttctttactgtctgcggactgacattagcggttaggtagccaattcaagtttaggagaccacctcattggtaaggggagtccacttgcctccaaaagccgcatggtaaaacagttaaaaagactgtctatttcatgtaaggggatgaaatgctttgacaatctaaaataatcttggtgataagcagcccagccatggtagagatattttaaacctctcaatatgtagamattattttaaaactctaaacaaaaatagttattttgaattcacgtagagcacagtttagatatacataaataatgaacaaaatatagtgatggtatgctattgtgagttttcttttccaggtactaggtgattccaaccgtacacacacatacrtgtgcaaacacatacacacacacacamcatcttgcaagttacrtacaaaagccgtatagaaaaaaaattatgatttttgtccttcatcttaaggaacttgcttttgcctttaaggatgaagtccagaaagtcatgaagagtcaaataagagtaaatgatttaaataacaattcaggagaaccacagatgagtcaaagggctttgcatcattagttgctaaatgaattatttggattataatgcttaaaaggagtgtaaatggagaaaatttttcctagtgtagttcctctgttctttttccatttagcaatagtttattgagtgtctattatgtgtgataaaatttccaaggtaaaatcaagtttgtattatggttaactataagacagtttaraactttggaagcagtaactatcaaacaggtatcaaggattttgtacaaagaggtccaaaaatatctagttgatttctaactggaagaatcagagaaagcttcgtggagcttggtatttaccatgtgtttggaggtagcttttggatggaataaagcagggaaattatccttcaggagccaagtgagtaaagattttaggatgtttttcctggtgattaaagtgccagaaactagctttggtagtgtagttgaattaactaggcttaattcctatcacatgctattgcagtttaataaattcctgtggttaatggaagcttttttaaattttttttttctgcctcctgcagtgtgctgctctggttggtgaagaccagcctctttgcccagatcttcctgaacttgatctttctgaactagatgtgaacgacttggatacagacagctttctgggtggactcaagtggtgcagtgaccaatcagaaataatatccaatcagtacaacaatgagccttcaaacatatttgaggtaaggacatcctttggaaacattaatttttcattgagtttggcttgggccmgactaacatggtaatagacctgaatgcataatgagttcttactttgctatcatcaaaagacttttcatcacagttacatactttctaatttatggaaaaacagcatttggaaaacaaatgttttgtttttatttttttaaagatttaaaaaataaatcaactagggactaggaatcaacaactgtgagtgagttaaactgtgttgaaatactaaagggttgtgaaagattagtgacaaagaagaacaaaagtctaaacctgtttattcctgtctatttcccacagaaagaatgagcaataaatggtacctcatataaattaataaataagaaggcctttctttttaaccaagggggtagatgtctacctttgtttgctttactaattaggtgagctcttttgattattattattaattatatttttggttcatatctctaatttctttatataatgggaattgctaaacttgactaatctactgtatacttataaatcagtcaaaattcatttacttttcagtagcaagaattacctccgtgactccggactcttattataagcctaccctataataaagaatgttaatctattcctattaaagtgttactttgagaaaaggaattctttcccacaagatcagtactcatttacttgaaatacattattttttataggaacaaacatttagtgagtactctggcaagtgaattaaacgaaggatgacatatcggctagttttctttatcacaacygccagtgccatcatcatcatcatctaatgttttctgagcacctactatgtgctggacttttcttattcatcagcaaagacatttcttatacttccatgttatttggttgaaatctgagtcttaagaaagccaagtttaaaatattaactgagttttgctggaacccagcatataatacatgctgaataaatgtttgttaaatcatgagagaatgatgaatatattaatgttgataacaataatagtaatgacaataatggccaacattttggtatactcatgcttaatatatgtcatctcacttatccttgaaaacaacctattgttaggtcctattgttatcattcctgttttacatatgcagacactgaaactcagagaggttatttgttttccccaaatcacacagttgacaataaagacctgggatttgaaccccaaatttatcggacttcaaagtttatatccttgataaaaatagagaacccatgaatttgggtgacagccatcctttacaaagacatatcaagctgcttctttgctcaatatatttaaaaatagaacagaatctttcctttcagtgttggttggcacggaggtagagttagctggtgagccgagacggctgtaggttctgcctatggctgagattttgtaatacctctggagattaagtgggttttagaagaatgcttaaggtagtagagtttggactggggagacagaacaaggtggagggaacactgaaggttgtggttagttctactttcccaggcttctcagccgggtcttagaaagttcatgtgaggacttggccagttagaactggtaaattgaacattcctcactcagtacayttgtcaagttacaggcccattctaagtcatgctgcattaaataaacaatgctttaaaaaatgtccatctccatagacctcttatctaaaaatcacctatttcatatcaggtgaatgccatgcattttgtagaggctagagaataacttagcggtaggggagatggcataggagtcaatgcctctctgrtgggctactttaaaaaaaatacaactttctccataacttttatgtccctatattttgtgttgtggtatttgtgagaggtactttgcatttataccttcaggagacttggttcagcatctagttaattatctacatgtaggtgcttaatatatgccatgccaccctttttgtctccctgtatcatattctatgctaataaaattattttcagcactctaaaacagaagttcatttaatttagtctctcattaggtcattttaaaccaatgattctcaaccaaaggcgattttggtccccgccccacaccccaattcacgggacatttgacaatatctggaggcatgtttggttgttatccctggggacaaggggatgctacgagcatttattgagtagagactagagacaaggaatgctgctaaacatccaacagcctacaggacagctcccaccacaaaaaatgattcagcctccaatgaaaaaagcactgaggttgaaaaaccctgcttttaaataaagtcacaggcttcccctttataaattactaatgattaattggtcagatttctgagagaagacatagtaagctactggatataaagaatgagaagtcgtataacgatatcgggatgcctggggctccaggactaatatgtcaggtatcctcttagtgtcagagggcaaaagtgactgtttaggtaagttcccataacagttttctctgaygtcacaaagcccattctttatcgaggcaaagggtaaagtcatatgtggcaatgcccttaccaacagcagcagcttcaggagtatttgcatggcatgaggacacctccactctttgccctctagtgttaaactcaggcatcttttctgtaatgtgaaaggaaagcgtgttttcagcacaggtgacattctaaaattgggtcttccctgtgaagaaggttcgtatgaaaccagataactctttcatggccacaggtttgtgttgcttctaccaaagcagcatttcagggaagtgccttcccagggccggccactcacagtggacttttcacctgcactcaccttcttccaatttgcaaagccctgcctcatcacatttgagaaggccttgtacttgagtaagttaaacagtcacgggctctgctgtctctgatctgacaataacaagcattatctactttggattcccagaataaaatcaggcactgagtagttaaatgcttttccctgactcaagtagcacgtcaatgacaccactggaaactggccatcgactgaattctcatcaaagcagaaagtgggatttagggatatataatagagtggcagagtcttaaaatgttgagagtaaattatgtatctcttctttttgtttcttccatatgtttgaatctaagtttaatttttatttaacatcacaaacttaataatgataaaaaatgaagctgaatgtcacaatttgagaaagggaattctgggtggtggcagaggggtagcaacatgcaatagcacatgttggttgagtaactggacacgcaaacaatgttctctgcttacgcaacctgtgtttggatgtgtaaatgcaggtgaccaggtacgattcagaagccactttaaaaaacaaagcaaaaggctcagaggtaacagcctccagtgaatctgatccatgtgtaaggaaaacaggatgcgtccctggaccggctggtagcaagatttatgtttcagaatattgcaacataacttccttccctctgttgcctttgtgcattgtttgaaggaggagaataaaggactacttttrcagcacagcagtctgtaaagatggatggcatggggttagtttaaatagcatattggcctttctgggtcactgtgggcaaccttgtccctggtttattttaacacctgctttaatgcctccatgatacaactgaatgggcatctttcattcattcgtctgttacttctgaatgaagctacttggggttcgttagaatgayggcaagtgagaatgcagtcrtctctaggtcattacttgtaatacgttctgaggactgcctttgctgatggggggagaaggactctcacagctgtagccagcgttcatgtttggtcattgctggaactctcaggaagcctgaaactgtgaactttgtagcagaaaagggtgagtggtggttttgtatttgtgtgtaaattatcctgctatatgcaatcaaggaaatgaatgtggacgctttcaaggctacttggttattctagtgggaatatagatactttacttttcttcatttggctttcagttatattctaaattttgcaaaaatggacatatattatgtacctatcaaaaagttaaaaataacaaatattggcagttcaacagaccatgagcatttgaggagtagggaatctgcctgtcttgttcactgacatttttctagatattttctcagaaaatagcagaaagtaagaactcaacaaatacttgttgcataatgagtgagttgatcttcatgtgtttattgatagaatgaactgcgttaggtaatgtgaagattatatacaaagcacaaaagaaggcctgtgtcctaaaggactttaaatctagtttgggaggcaaaatgaacaaatgtaaaacaattaggaaaccatgcaaggctgtgtatacaaatatacaagtatatgcatatgtttttagttcttagcaattcgaaaacaatacaagactgtatattcatgtatatgtatatatgtgtatgtacctacataggattatatatatatttgcaatttgcaaacattgcgagctcgtgtatgcatatatgcatgcatatatatgtgtgtgtatgtatgtgtatttctagctgaggagataaacagcaagaataaattcacaaagccttgtaagagaagagcagagcgttttcatagacgggatgtggaggtgagcttggtttactcaaagtaaaatacatattaatgggaacgtggcagtagtgggagtaagtttggatgtaaggtaggtacaaaattacggtgggtcatgagaacccagttggaaatgtttagagtctgtttagaaagtaggatgtcattgaagattttttagcagatcaacataatggaggtggtatttaagagtgataatgctgacagtcgtaagaggtrtaggcaagtaggaaatacggaaaatcagacagcaggcagtgctgcattccaaacccaatgtgatacaggtacagggaagggacaaggtgatagcagagggggtggcattcagggaacagattcaaagtaccttgaaggaaaattccatcagccctgataactctgagttcggatagagagagaggtggtaaggaatgctaactcaaagatattccaaagagaagcagaacctcgtggatatcgttcctggttaagtttctgctcacctttaggagctgaagtactttcctagactcgtgagtcattttacaaaggggccctctatctttccactgcctcagggacagaacatatttaacccaatccacaaatttacgtggtgtctgctttttttcacttgtctccttggaggaaatcctgcagccttccatggtaatgaattcctgcttctgactgtgcctgtggtcagacagacttttctatgaatggcaaacctcctggaattttaacaaaacaaatagacaagaaaaaaagaatgcatgtatatacaacctcaccttaatttaatcattggaagaataaattcttttttgttatgtgggaggactgaattaatttacaataatcacttttataagatttctgggatttccaatttgcaatcaataaatgtttgtcatttaaattaaatttacggcccacagccagatttttgccacacttggtaatgacacttacagagaacatagacttcaagtaagaaaataatagccatttaagtggagagataattggctgtaacataagaacattgaagaatgttgaaactcatrgagacttatggagtattttaaaaatttatgttgtacttatctttgcatttgtagtctaccacaaaattccaaattctgggtataaatcagttagatgttcatcttggagagtcataaatcaggaagcaacaatctgacccagcctgtgtgctgctttattttcagcctctcctgtcggcttatcttgcagggagactaaatagtgttgttcgtttgtgtgtgtgtgtgttcatctacacacctcatttaagcactgtggttttagacttctcggcttgataacatctggcttatcttgggaacatctggtttatsaccctatttcttccctgccattatgytgaccactgkraaaatatggcwmaggagttctgacccacagggctctgyctcttggtatcaacccctgctaataaatagcaactcacaggatgcaggttacgtgaccatctttcactggcacwaactttcctgctggtggcttttgttaatggaaggtgtggctaggagagatgaaattggctgctttttttttttttttttatggacgttgattcggttcttagccatttgcagtttgcaaagtgagaatgtgtatgtttcattaggcacaaggatttcagaaagtgctattttgtattttgggataggagaaaccaatgatttcatgtcagatactctaggcactccagaaagtaaactgggacattttatgggcttattgtaggtttttccaacctcccggagtctcaactggctcatcaaagttactctgcctggatatctttggggccaaaatagtggagacccaaattcacaaggaggaaatcttggagcagaatcaggaaaaagtggctcattgcttcttagatttacttcaaagataatagtgtaggtgaaagtaatcacaaggttcagggtgctgcattggacaaactgtctatttgtatagcaaccatgtgtctgtgtggagaccttatacacttgctgtgtttatttgtccatgccccactatctctacgccaggtcctggaagcacagcccagcagatgactcacctctggatggaatcaacacacaaagcagataaaaagctgaacattaaagaccacattgttaaagcagagagccaaattgttcctccaccattccctatcccagacttcacatctaacaaggttaatttgtccctataattatgtgcctattctttgagtaatgaaaaattttattgtgggttttataaaatgaattgcctgtgatgtaaaacaatttcagtaagggccatttttttttcttcttcttaacctctcaggttccttttaactttttttttttttttttttttttttttgagakggagtctcgctctgtcgcccaggctggagtgcaatggcaagatctcagctcactgcaacctccccctcctgggttcacgccattctcctgcctcagcctccctagtagctgggactacaggcgactgctacaacgcccaactaattttttttttttttttttttttttttgtatttttagtagagacggggtttccccgtgttagccaggatggtctcaatctcctgacctcgtgattcgcctgcctcggcctcccaaaatgctgggattacaggcgtgagccactgcacccggcctccttttaacttttaagactgtgcgctcagaggtacgtttgaaagcaaggcagcatcctatgctttactgtagctagaawgagagcagggaaaaggggagagagatccacaatgaaatacacactcttattcttggcaatggcagagttgtttgaagctaaatgacttcttatccattaagccatttgtcccaaagtgatgatagaagatacttttgtgccttttcttttccaaaatgatggagtgatttgcacagtttcagattctaaacactaatattttgtagacctgcccatctccattactactgcaagttattcattcaaggtttgcagccagatggattaatgaattaccagatcttgcataaaatgacttggcctgacttaaacaactacttttttttttctttctccttttctttttttgggggttagggtggggagcagtcttacaatgggtgttaatgggctgtagagggagtgagcccccattgagtttttttaaactagcttttttaaagcttcactgcactttttcattcttttctgaacttctgctcagaaaccgtcagttcaaggaggagcaatcaggctggtagggcagagaggaggaaggagactcagtagtcaaatccctggtggccgatgcccttccctgcgccaaatcagcatgatttatcagagccctctcttcagcacagagttgagagtgagttccagggtcctcctcacacaatatgcatagctggagctctgaactttgaaggaaagcctcagagctatttgcaaaatgctggtgcttagtgaatactaaattacatttaggaaatagtctactgctaccagttatacttcatttttattcttgacacagacacctaaatcagagaacagtaacatttcagagattatggaagcagtttgggtatgctccagcmctataataggatcagaattttaaggccttttgtattattaccaatagtcacttagtttctactgcagtgtactttgtagggaattacagcttttactaaaaagattaaaatgctattatgcaaatgattgcagtatgttattatgtttacaaattaacatccatggctcaacacacaaattaactaactatgctatctgtgttattaaggatttaataaagtaactgttaataaaaatgggtagcttggaactttagtagaaagcaattgtgatttaacacgtggaacttgagcattgtgtttaatgttctaggtgatataatggtaaaataaagttgaaaaaagcacatagaaaaaccaaaactgtgtgaacagcagagctgcttgcctgagaggctgatgaacgtgaactaaatagcttcaagctacaatgtacagtgggcagcatagcaataaatctaagcaaagcacacaaaacatcttctattaataaatagttcattgaaatgataattaccctccattacgtgtttgatatgttccatacacacagagaatacttatattattctaaaatggatctcagagcaaattttgctgtggcgaatgggatttagctgaagaatatcgctgggtgataaaagagaagaaggctgggttcagactaagatggctttacaaacaggctgcaaattgctattccgggctgttcataagagatcataaaagcaaggagataagagccgccaaggtccctgagaaatgaatgtatgtgattatgttatctcgtaggttggatttactagacagaccgacaacaccttcactttagcccaacaggaaaagtagaaagagatacaggtttggataacaaactttgttagaataggaaattccaaaacactgtaattcaaatgtttcagaagagagccaggattccagtcactgacttctgtgctggatctcaaaaaaagagctagggatatgacctaatattaagcaaataaacaaaaaagaaacaaaagaattacaagaacatcctggagaactaattctatatttcaaatattttggactsatgtttcttaattctcaaataaagatgttgaggacttctaagtccacaaacaattatctttttaggtctccctattgagggatactaacttgaacttcttagtaggaatatctggatgtgcttaagaaatgtacaagcagggaagacaccgcaaagttggtcaaggtttgtacccttgcatacaatacaagcaatttattttgttccaaatagcacctctgtggttgcaaaactacttatgcaaatttttgatatctagctttagcaaggtgcctggttccttcatttcatcccacatttggataaattgtgttgttcttcactcttccaaatttgtccttgtggaagcgaacacttgtaaattggttgaagcttgctaagagaaagaaagggaggaggtagggaagaggaggaaaaaacttgaccaaaagcagttgctgtgacagcttatgatttgatggtttgtggtcttgtcctgttctcargcacctgatcaagaaagtggtacaatcctgctatgcagacattctggaaatcttgccaacattcacctgacatgaccaaggtttaaagtccttgctgtaattttacaaagcgtagtgagagtgtgtgcctgtgtatgtgcatatacactctctcatatccttttttttyttttagggggaaaaaagtgatctttgccatagaagggtggtaaaataattagtccaatagacaaatgtcttggcccatgtttaaacagagctttaaggacacagtgttcccaagagtcacatatctaaatacaaaccagtgtcagctgccatgcagaccaaaatgtaatagcctgctttcacataggtcatcgtcaatccattttggtcgcagtcacactgcacatctgtttctgcgagctgcagcttcttaaggtggcatttggacttcatcagaacacaaacaaccaagctataaattgccacttctggagttactttgaataagtgtatactgtttcatatttataatrgtgaagcttcataatattcacagtgaatatgtaacaccgatcagttcaacaagcatgaaattgtatgttgtcaacctgtcacataaatagagtcatattctggcttgcgataatgttgaactaacattttttcccccagaattgttgagaggttcacaraaaagtgaggaggtagcatttcctttgggtagataaccagtcaaggctattgtaaagttgatattactgttgatgggttccttttctcccctccctccaaagcactagcttttctygggtgaatgctaattggctaatctggtgtgtttctgctgtcatctaacggtatcattttcagctagtacttggaggctctttttgggttgtgtatgtgtgagtagctttttttcccctttaaaacttctttttttttctttctattcttgtagtgcaaatcagtgctaattgtcatgaaattctctaactatactctggcaagctttcttgttgccttttcaccccagttaactcttaatgtattactagagcattaggaaataatgaaagctggacattttattcaaacttagttgagatagagaatcatctaaagagatgcagaaaaaaattattgaaccaaatttgcaccttactaaaaagataaaggaygaatgaaatgtgcttgccggtagctacggagaaactcagagaccagtttccacagtggctgatatttctgcaccagaggcatggtagaaactgatgcaagtctgttttcacttttgagaaattcttagatgtgttcaaccttcctcatctttcttccaatggcctgaagacaaaaaggcattgcaatctgtattacccgcttaarctgctaacttcaacaccttgagatagtacttcagtttctctaaagcactatgcaatattacwggggattattaccaacacttttcttttcatcccatatcacttgggatatggctggtcacatttttttctttattttttwttttttwttttttwtttttgagacggagtctcgctctgtcgccccggctggagtgcagaggcacaatcttggctcactgcaagctctgcctcctgggttcatgccattcttctgcctcagcctcctgagtgagtagctgggactacaggtgcctgccaccatgactggctaattttttttttgtatttttagtagagacggggtttcaccgtgttagccaggrtggtctctatctcctgacctcgtgatccgcccacctcggcctcccraagtgcgggattacaggtgtgagccactgcacccggcccacattttcttagacaagaaccaattcactggctaaagctctcagtttccaacttttgcaacatcgtcacatttcttcttgcctgtggattttaaaagttcatctctcacttatttacttacccattcatcaaaatataattgtcatccattagcatgcttagtgtctggccattttagggggatacagtggttaaaagtaaacctagtctctggctccatgaaaattttggttagtgatgaagacaggccttttacaaataagataagctgtctgtttgaggaagtagagcagggaatttctccatctgtctgttacccagttatcactagcagataaattctgcccttctcctacttattgtctttagaaatgccttcaccttgaaatggaattctgctggagagcatttctcctagctagaggaatattctattccaaaccaagatctgtcccactgccccaacaaatgcagggcagtgggacagaatatttgaggttggaagacctgaaattkatgatgtcctacacacagtatattaaaataacagtttgctcattggaagtgctgggtggccagggagtgtggagggaaaacaagaggaagccaaccaagggaagagagcaagaccgtcagtggagagttctttaaccagtgtgcaagtctgacctgaccagagtgctgtgcccttggtggggcttctrtggatgagaactgtttggtaccattttaggtctgttgacctttctatttgagaatggtatttcagtccagctggaaggactgacacgctttttgcctgtttgagacacttggtgtatgtggcttttctctctctctcttggatccatcatctctaagtgatagctccttgcttcatggggtaatgctattcaggggctatcctgcacccttgggagaggcatgtgcaggaagaatgctaccgatccctttcctcttccctctggaggtaccaggcattacatccctaccaagccttactcaattaggtctctttcagattcctataatactcgagcttaaatcctcttctccacagttctttctgagaaatttatttctgctttgaaacggctcttgtataggggaaaagtgcctctattatagcactgcccttggtttttccatgggctcttggcttaaggacattagcttccctgggtgccatctcatttgctcagatgtgaagttagagcttctgtattccagacatagttctcctgggtgtccagggatccttgccaacccagattctctccagatatgttcccatgtcagaatcctcttgtgtcttgccagcccatacttagcggggacaccctgctctctcctctgagctgcatatctcagcatgcatttttcatttaggcaatgctgtctgataggcaggttcacctcctattcccactggagaagagtctgggcaaatgcctgaaagtttgaacacagcaatgccatataggataagtgacttcttttccttgctggtccccaattccagggctctgcgtgcaacagatttgagagttacattaggtcacaatgccactgtctagctcctttaatcctatcaccggcaatcccagcaatgtagctgaggtggctgcccctgtcctgaaggactttgtgtcagtttctcctgggacaaatctagtctggaccactttgcaacatttgttcaaactgaaaattttgacaaagacattctgttcacaaagagccaacaaatgttctgtgtttcgatacatttggaggttacaaaatgttgcctggtcttggcagataactaagtctggggacccacatagtgcaagccatgccctgtttaatttgtctttcaatggcaaatgtgtttcttctgtgattcagcataagggatgataccctccaataggactgtgtgacctccctgctgcttttgtggtatagaaaagaaaaaaaaaaaaaaacacggataccacttttttcctttagttgctggtttatttttatttccagctacatcttttatagttgaaagagaagatgtatgttccatagatagtacgcatttttatggttatttttataattcatactggaaaacctaatttctgtagccattaaaaatttaggattattaattgtctgaaacataggtgagaagtacactgtttttaaaatgtctctgagaagccaaactagattcagaaaaattccctcagatggagcacattttattcccagatacacttcttcacccctcacttaacgcttgcttccttttgctttacttatgatttaaatgaatccggttgtctaatgttctattcaatatgtgatgttctatgagcacatatgacatttgaagaaatggtttagaaaattcatgaaatggtgacagtaaaaagataatggtgagcagtgacaactgaccaaaagagacaagactacaaactacagaaagttgacaaaccctgaaaatatgacagtctggggccttttagtttgagggaaaataatcctatatttctcaataggtccatacagtcattttgcaataccagacagtgctaccaaaatcaatcctcataatttttaaagtggggaaaatatgtaaatacgtgattcggaaatctttccataaaaaagttttaataaaaagtttggtgcttaagcaagttaagttctttgatttatctgcaccagtgcctatgtggattaaagcctgatcatgtgaggaaataggtgaggcatatatacaaacacaaacacgtagttttagatctaacagattttaatggagtttatatattatcctgtaagtgtttcctgtgtagactttgataataaagaagaaaatgctccatgaaataccgaacttcattttataatctgttagattacatcttcccttaaaaatacagctattgaaatttycytgaataaagagaccactggattctttttccttatcaatagtaaagctttttggctacagggacgttggtcaagacaaatatagctcagtagagttatcgttaagtaagcaatttcccacattactttagaatgaaatcgcctatacttttctccttcatggctttccgtatttatcctacccagtcctcaaataagccaccaccccagcaatgcacaactcacttgtaaatattcatctggagcatacgaaatcgtaatatcactacagagactaactgcccccccgcccaccccgccgtgccattttcctttggagactcttataaataaatgaacaaccttagagctttcaaaacagtcattaagatctgctacttgcctttggataaagaatttcagataatgtacaggactgggcttcctaaatctaatttctgtctaaaaacctagggaatgctgtagctgtatcttctctatccaaactctcttgactgattctggcacctttcacctgagaatgcacagctcaagattctctatacggacccagagccttggtcgggccacracccttcattaatattcaaactttggcagtttcaaagaatgctgccctcctcgaccactgtgagcagtccagctcccctgctactttctctcatgcttatcctttgtacgaagacatctgtgtctttcctcatgtctctttcaggagtaattcttccccttgttcaattttttcctttctctttatggctgtcgtaatagcccctgatacagccaggcagccatgaccctgtccatcactcacctgcaagctattcttgaaccactggatggtccctgagtgactagattaatggtgccagtggtgagccttttcacctgacctttcatccagtgacatacaagctgattccaggctgtgtgcaaggctggctgccctgccatctctgcaccctccatgaaaccaagcagtggaaaggagagtatccatgcaaattaagtgcagaagcagggataaaataaggtgtgcagytgggagttatcagaaattaaatctgtcttcctttgagtgccattggaaatgagtcttaaggaatgagaacygaaaggaaactttccatagacaccatttccataaacggtattgtcacaatatgctattttaaagactggttgttttggtctgtgtttacattaagcctttaccaggcatgggataaactattaagtcccgaaatttaggaaagtatttgtggccgtctttggcacaaagtgaatttttgttgtcacatgtgcaaaagagcatctttttctttcgttaaggccttcgaattgtggttcagctttctaagtaatagctttttggctaaatctctcaaggtgcattataaactgcatgagggaaagagggacctcatcacctcctcagtccctagcacaaagctgtgcacattaaaactctctctagtttttgttaatggacagatttacaggggctctaccaaattcagaaagagagagagaatataacatgaccttcccagccattcagaccaatcatgctaaaaataagacatatccaagatctgagaacatgttctccaagagatggtttataaacagagccaatagtgacagcagtatgctgtgtgtctgccagagtgtctgtgaacttaccccctaactcagctacaagacttgctgttcagatgaagatatatggagttgggagacatgtggttgtgttaagcgaatgtgcattggcgggtaaaggcgctgctatatgtctactgaagacatagagcatttactcttctctccccgagaagaggaaagggctctgccactcaatgaagagctcaggaacaggtaccttaccggggttccagagcatgaaagtaagtgtgtctctgttcaaggaacccgctgttcccaggaagctcatgcaaatgcatggccacagcttcccaacacgctgttcccagcactgtgcccgtatttcctggctggttttgaccctctcaatggattcagacttaaaatttttgcaactgtttttgtcgttgttgttgttgtagtttcctcgtttacgattgtaatgaaaacagtttacctcttgtggaaaagtrtgcatgattgtacaagtttactgtgccatacttgtatcgcagttgccttatttttggaagaatcaagcttaggggctagaaagaaatcctgggctggggaatgatgggtaatttctcaaggcattcagatctttcagaagttgtgaatgattctgaccttactttcatttatagtctgtgatcattggaaccaggatgcaaaaatagcagagagaggatctccttcaccttaattccctgcccttttctggtatctgtagtacaattgactatatggacatcactgctattttagcaaaagctggtgagttatcttttttagacgggacagtctacccagtccaggattttagtctgactgtcatgttataattcagtatgttcctatgcaggatgctctaatgcagagactgatttcattcattcttaaactgacccatttatcaactattttaaaaagcaacaactacatgcyaggcactaatttaagtgcgcataatacaaagatgtattaagtacataatgcctacgacacagaattttcccttcaggagttggttggctagtgagaaagacagacttcggcaactaattataaaataaggggatgcattctgtattaaagtcagaaatgaagtmccatgaagacacacatagaggagtaaaaatgtccgtgaaaagggtgagaagagaggaaatttgataattgttgctagatwwttttactcgtgagtcttcaataagtcagaagttaaataccctcttatttatttataaaatttagcaaactgcacttcccacctcttaggaggaagacaagaaaaaggatacacatagtaggttcttaataacatttgaaaataaatttgccttctaacaagtcccgtctacattgcactccgcagttcaatggctcattaggttttaacaaaagcagcgcagcaaaataagaaggattcttgagtcaagcacccccgggcggtatctctgagagcaaatgtgacaaatagaatcagaaatgaattaaatagtcagctacagcaagccaagctaaaaaaaaaagctctgaaatgacccaaaatggaaacgtattacagttatctgcattcacagtaccgaacaagtttggtcgtatttaagataattctctagtgcctgctatttttagctcaagggtaagctcctgtaagagtctttcggcattgcatccctttaacctggcctaacaaactaagccaataagctgtctgattttcctggtccatcagggaggaagagagatagctaaaacaaaccatttgcggggaaaatgttcggcctatcttgtgttaagagcttttttcatatagatttttaaaacatcccaatattaagtgttgcctgtcagagaccaaaatgtcaagctttgctgttttgaaattggaggctcatggttataaaaagaggattttataggcctagtctaatggaaataaacattactccattaccttcagtaaaaccaaatctttacagttcaagctatcattattaatgtctatgagaagaaagaaatgtttctagggctttatttattttttttaggtaaagaaagacaggcgagctgtaccatagcaaatgaaagttttcttaaagctttctcctcagtgactttgcagtgtgtaatttaaaagcagaaagcaaagaaaatgcagttttaaaacactaggctggctattcctggtatctttctttcttacatattcacaactctttgtgagcctattgctctgtcaattcttgtctgtctgtctctatatagtgtatacaaacaacttcatcaactattattcacsaccttctaagtgcacatgtacatgtgtgcgtgtgtgtgtgtgtgtgtaggaataaatgtgggctgtctcagtttaagccatataactgcatgtgtagattacaacacttaacaatatactagtttccactcatttcatcagaaaccatgctgctgatcatcaaagtttaagactgttctcaggttgaccagtttacctacattctgaagcctgcatttgccaatttagtgtgaaatagatttcagccgcagatgctacctgtgaggcaattaatcgccagatatttcttgagttcatattattatgtgcaaggtgttatgccaggtgcggtaagaggtggaaaggtgtctaacacaaggcctcagtcctcaaggagacttgtcactgaactgcagaaatgagatacccatgttgatagaatgccacccaaggaaattttaagacatttatagagtccctactgtgtcccagacaccatgcatgggtcttctctcttaatagatctgattctacctgaattaccagccttctcataaacattttattggggccgtgctaagtgtcaatcactacccttggttatgtgtgatttctgtcttcccacagatgaggaacttaggacttagtatttaaccagaactcagatttcctggttcttactgcttctcctcagtgtcagagaagaaatgggtattttctatcaggaatcctcagaaacgctggccagtcacattgccaygttcaaggatatatttgcttgactgaggtggtccattgatggttgaaggatcaagctgtgactctttcttttcttttggaggcagtctcactctgttgcccacrctggagtgcagtggtatgatcttggttcactacaacctccacctcccaggttcaagtgattctcctgcctcagcctcccgagtagctgggattacaggcgagcactaccatgcccagcaaattttttgtgtttttagtggagatggggtctcaccatgttgcccaggctggtctcaaactcctgagctcaggcaattcacccaccttggcctcccaaagtgctagggttacaggcgtgagcaaccgtgcctggccagtggtgcctcttttttgcagagaactgctggttgcaattgcaactgccgtctgctgtcaatgaggtctttggtgctttgcaagcttgctgctgatctttagtcccctttaagacgggctgttaatctttagcacaaggctgactctgcaatacagcacacaccaggttgcctaacttcttgtttrtgtgctcccagggatcagaaaccagtttgctgtttccccctaaaaccacaagccttggggtcattgtctctatctgtcctttgttctccatgtacagtctgctgcgaaagactttcctcttgttcttgagtgcatgttcaccatcttcctccatcatttcctttgaaccctcagtaactcatacttaggtgatttagccttcctctcccctgccagggctggtygctgctactcctgaaggtatactaccccacacataccatacttgattgttaaaccaaacattatttttcagcatctgctgtgtacctagaattttgccrgaaaccatgataattacagaccaagtatatgggcttgggattcccttcctttggggatgcccagctgtataaggaggcaagacttacccgggtgacacaatcagacaatgggtaaaatgtagatagtaaaatgtggacaaagccctgttctaggcaccatataaataaaagagacartgaattagcccctgccttcagtgtccttaaaaactaaggaaacatgtgagcattggcctgatattaacaaactactctaagaattttagaggtgggaagagatctgtgaaacctatgagtgaagagggaagctaatgtggtggaggttgcctttgaaatagatcttcaaggctgggtccagtgactcacacctgtaatcccagcactttgggaggctgaggcaggtggatcacctgaggtcaagagttcgagaccagtctggccaacctagagaaaccctgtctgcactaaaaatacwaaaattagccaggcgtgayggcacgcgcccataatcccagctactsggaaagctgaggcaggagaatcacttgaacctgggaggcagaggttgcagtgagctgagattgcgccactgcactccagcctgggtgacagagctaaactctgtctcaaaaaacaacaacaaaaaagatacagatcttcaaggtgtagagagatttccatggacggagaggaaacgtgggcattttagacgtcggctttcatctcattattattttaacacatatttatcacctactatgtgcacggatttatgctagatgttggaataaaaaactgaacaggatagagacaatgctatgagcaacacagtagtggtgaggaaagaccaagtgatgactggggactcatctaatagagcagcagagaaagtagatacaagtgaatgggatcttggaattgtactaaattaacatgaggggagatttcatctagcatgctcatttcacaatggagaaactgaggcccaggcatgtgaagtgacttgcataaagaatatcaaggttaagtcaggaggagcagaaaaaaagacaatatggggtttgttagacaccagggactcttaaaagttatctggtggcatcagcgaagaaaggttatcttagagcttgcaaccaggggcctggtgaggaagctgttgaggttttcaggcttgaggtcatagagcttgaattagggggtgatggtracaatgaaaggaaggaatgcatatggcagacttcccgaaggaaggatcaataaagattgttgtcatattaagtgataggttggatgttgtggtgaaaaaagggaggaaaaatggctgtggtttcaaccttgggtgatttggagaatttgggcttggttaacaaaaatgagagaatgagaagaggacatgtttcagggaaggcgcagagaggaatgtgatgcgcagattgtaaagcaggtggggcggctgctattggaaggaagtccatgaacaatatgcgacgatggagctctggagaagtcatggagtgcttgataaggaggggtgtcttcaagaacattgtttatttggcaaataaactggaggaaagatttaagggatccccttttgccccacrtagtaaagatttttctcttgctttgagtttgataattcgccaggcttcttcttgccaataataataatactacagtagctttgggcttgcccagcactggactcaacatcttaagacaatgttaaaaacatagttttacagagtttaattaaaaaaataaaaactagtcttatctaattctcataatcaccatgatgggttgaaagtgttacctcattttacagtttggaaagtgaggcttaaataagtaacttgcccagggccaagttacagaaagtaaccagaagaactaatattacctaactccaacagtcaaattcgtaatcattcccttacactgcttcccaattaatacctctattgccaggcactacgcttctcatcccctcctactcccagcttctttcaaattttccaaatgcctggaattatttctgtcttcttgtttgcaattttctcaaattttaaaatcacaggaacctctcaaattcaggaagtrttccctgattaattccacctctacctaaacatctagcagmgacttgacctgactttgtccaagtagattttgtattatttagtggagagatcagcatgaatctgttcagccacagactggtcaacagatcagttcatgccctactgaccacagagctgtagacacttccatttgcagaggcttgtacttaaaagcatatattagaawtgtgaaactgggcactgtttgtgacattcttcatcctcactgtgtatgtggttgatactcgttgactgattgackaagatttttgctggcatttggttgagaaggaaggcaattaccaagtattgayaatgcatcttaaacctagctttaaagtcttttattgaactcttgggcatgtcttcatactaaattcagtagaatatgcctgttagataagtctcctgagagacaactttagtgaggaatataactctttttaaaatgcaatggaatatatgtatatttccccaaataaacaatttcttacaaattgcacgtagctgtgatcattccccttcctttagtgggcagcaaatcatgttgcatttgtgttatgcattttttcagaaatattttgccttttttttgtttctggaccaaggagtcaaaccatgccccattcatctttttcttatatacaattccttgcacataataggagctcagtaaatayrtaacactgcatggtattctctcacctacattataagcagggataatggcttttatttcttttggttcctgtgttctcctagcaactccctggtttctagttcaacattatgtccataaaaggtactcagtagctggtgaatgaaggaatgaatgaatgacatttaacttgtgatcatctaaaccattactaaaccaaattggaaatatttttaggggactgrgaaaattacctgggtaacatgagctgttgagcagcttctgggctgggtctggtgacwgtatcaaaatcttcagatacgtcagtaattccacttcagcatgttcattctttgtttcgaataatacaggtttttgtgcattgatgtttaagataaagtggtgcctattttgcatttctagttatgtttacaaaacagtgttttattgctgtctaaacatgagagtgctctcaaccactcccactgcagcacattgagaaagggctgttaggagtctttgcccttagtttgaaatatgttgtacttagaggtcgtagtgttctggtttgggtagcaaattattgatcagggtattatggtaacagctgtactgctgattggatgaagataaatatccaagcatgcaactggtattacctgacattattgtttttcctgggagcctagtcatcccaagggggttttataagaatggtcagaaggtaaatattaccaagagtctagtaggcagagtgcaagccagtggtacccaattctctccattcaccactatttgaattctggcccttgtgttttcctgcattcatcttttgactctttatttagatttccttgactttttagaatttttcttttgttccttgcttctttggcttcttgctgaggtatttattttttgaaggattatcaggaaacaatagcattgcttgtaatctctctgccattgagtttagtggtgcttcctctgctgttatcagagacttattttaaatagcattatttgttactgtatatatttaagatatagaacattatgttttgatttacaaacacatagtgatgattaccgyagccaagcaaatgaacacatccatcacctcacatagttacttttttttgtagtaagagcacctaaaatctactctcagaatccagtacaatattactaaccatagtcctcatgtggtacattagatctctagacatatccatcccacataattgcaatttgtacactttgacctttatctttccayaccttcccctccccccacccctggtaaccatcattctactcgtttattttttgtttttaaggtagggtgtctcttgctctgttgcctgggctgggtgcagtgatgtgatcattgcttactgcagcctcaaactcctgggctcaagcagtcctcccatctcagccttccatatagctaggactacaggtgcgtgccaccacacttggctaatttttaaattttttgtaaagacaaggtcttactatgttggccaggctgctgttgaactcctggcctcaatcaatcctcccatgtagagttcccaaagcactgagattgtagggttgagctactatgccccaccttctactcaaagatttcttaattgtctaactcaaaagccctttttcaggtccccattcttcttgaattttctgtgctacttgaatattccttattgaccaggctacatgaaaattctttctcttttttggtgttattttattttattttattttattttattttattttattttattttattttgagacggtgtcttgcactctctcccaggctggagtgcagtggtgccatctcggctcactgcaagctccacctcccaggttcctgccattgtcttgcctcagcctcccgagtagctgggattacaggcgcccgccaccacgctgggctaattttttgtatttttactagaaacgaggtttcactgtgttagccaggatggtctcgatctcctgaccttgtgatccacccacctcgacctcccaaagtactgggattacaggcgtgagccaccgtggtgttacattttaaatattttgaatttttgttaatgttcttctttgcagtctcccaatttccttccctcttctttgaatacatcttctctccttcctttgctggaagaccctaaatgtacctgtaccttccccttacactttcagcattcaggccaactagagataattggacaagccaaagatcatgtctgacatggctcgctagtggctctgtgtctgaatgggttggcatcatctttaagaatcttgtcttggcctaacttgggactgacattttaagcattaaaactcttcactaattaacagaggcaacckaaagaatagtttttgaaatgatgcttgagtgttctcttactacattccctgggaatattccctggaaagcccacagagttgataatgtatttgaatcatgtactggaatgggctagtattaaaagttattmcaatactattttaatttatatttataaacttatttatttgtattatataaatttatatttacatactttaatttatgtttatatttaatttattctacaaaatataaatataaatttacactttaaatctatataatttatatttatataagtatatatttatataccttaatttgtatttatatttcaactcagccagtccataaaacttgtagttatttttcctgtctttctaaaaagkctaaaaggcaaatgttctgcagtatggaactgagtctccgagttaagaggtttgccaggtaattgctagcaatgacaaaggtgagatttgactgtcaattttctacctttctgaacattagacagacttccaatattcacatatcatctctatgtggcattttccaggactttcttaggtcttcaaaaaccaaatgagggacatatctctacttcacaatgaggaaaccaggacttaaaggggcttgcccaaattccctgaggtcagcaaccttctcttctctttgtatcccaagaacctaaaggcaatggtagcaagatggttaggagactgggccctgtagtcagacatgcctgcctttcaaatcttagctctaccactgacttgcagtaggaccatgattatcttttttctccttttgtaaaatagtgcctgcctcagggttatttattcattcagcaaacatttactgatcacctatcatgtgtgaaaatgttctaggaatatagtagtgaaccagggagtaaaaaaaatcctgccctcctggagcttatgttctagttggttgttgttaaaattaaatgagacaatgcattgaaaatgtcytgtatagtgcctggaatagagggggtatgcattttgacagaattaagacaaagtctacaaactcctggaagtaatagcttttgcctttccttgaatctataaagatagcaaatgtaatattaataagtcctttacttttccaagaaccatttcattccacggaaagccatagtagtatttagccatagtagttgtttttataatttagccatagtagttgtttttataatttagagttctttggttgcaaacaatggaatagaaaacaaagaatcaactctagcttcctcaagcagaaaggcagaaggatatgtatggctgatggaattgatgagagggtgttgaactaggctyagtacctaaaagacctggagcctgggaactaaactgcaagaggagtctcatcacgattcaaatgtcaataggttttccctattctgtgctagccctggagtggtgagaatagtgtgaggcttttgcttactggctctcrgtgtgtatccagtcaaggagggataattctgtgaaaggaaagtgtggtgcatttacaaatctactgggcagtcaagaaacaaccagtgacagttctgaggtcttaaagctggatgagttatactgtcagcacaaagtgtttgacattaagtaaaagaatggggttcttgttcccaactaaacagtgggaattctaccacccagtggctatcctctgaaattccatgaattgaaactagtgcttatgatttagttaatatacatttatctgtatgcatatgcagataaatgtatatttatctatttagtacataaaatctatttagtacgtgcgtgtgtgtgtgtgtcacacacacacacgcacrtactaaatagattttatgwaacttcatccctggctttatttgccaaaggcgagtcctccatcttgtggtttctgcatctctttggcatttgtcactatgcacttgttgccttttatattgtcacaggaatcccagaaacacctatagaacatcagtgatgagcatcttctgtgagtccagtggtgcactggctctgggaatatggagagacctgttacattaccttctataattacatgtatttgctattcctgagaaatcatttgtgtgtctctgccaggaaacattagcctttccattttttaagttttcaaataatatatgtagaaataatataaggaaagtacatagttcaatgcttgcacttaattgatagtcaataaatggcaatttgttgacattccaataccttgaacttcctggatagctctgtaaaacggaaagtgtccttgggaacaaaactgcacaagcatgctggtcaagattcaaattccagggagaaggtgttcaacagcctgcccctgggctctgtgccagcctctcggtgatgaagggagagtccggcttctgttattggctccccagtatgtattcaatgtgtacctttaatcaaaggtaaattccatgagggaggggccatgcctgttttataggccactgtatcttgcatgtagcagtttctagcacatgatatgcacccaagaaacatttgttggagaaatgaccaaattgggattctctctacagaggctaaagggaaatgactaagctacttgctgagtggctatcattagtgcataattttcaaaagcaatcatagaatgggcaagaygtttaatctctgtcatgaaatgtaacctttagagggaagacaagcaatcacaatgtgacttctccgagtgtcctgcagctttgagcatggcccgggcctctctctgatggggctgatgaaagccaacgaacaaaggcattttgtatgttaaaacaaaccacatttagtcaacagtgtttgcaatgactaatccctggtaagaaaacaccaagaagtggcctacacctcaaaaaatataagcacagagaattctttcttggaatactggctgcaaaagttcagcgtttggcatttgcaatgattgctgtttgattttctttatggttgtgttggcacattctggaaagtcaggaagctcaagtatatactgtgggagctctatggggtgggaataggagatatacaagctttgttttgtattataactattgcaacacatttccaaatgtcactttttgtccatggtgggagaacctggggatagttcaatgtcagatggtttcaagtgacataacactagtgcagtaatttatttattcaattattgtttattaagtgtctactatatgttgagtctggtgacactttggtttttctgtgtttaaattttattgtttcattctgatgtagcacatcccttcctgcatctctttgccagcctaattccttataacaatccagacttcccctcctacmtcacttctcccaaaccaccaacacctggcaccctaccacagcttaggtgcctctgatgtgggccctgtagaagctttacattctcccaggatttctcaatctgcctgtttcttatttgtcctgtctctcccatgggatgagaagctatttaagggtctgggctrtggttgtcactaacccagtatcattacttaactcagtgtctgaaatatagtyggtgcttattaagcatatattaaatgcatgcagaatatggaattaaataaacctgaaattattttttggagtacattatacaatgcacaagagtaggcatttttagaagcatcgagcatagtaggtccttgcttgtcccaagagagcgttcagttagctaagtaatcctcatatatttgacaaatgctttytgaatgccaattatgttccagtttaccatctatttggaagtaaagataagtattttaaaatataactaacattaaaagtcttgagtggtaaaagccagattcaaataagacagtgaagggtcaggggttgcatgggtatattagtccagtctcactctgctgctaaagacatacctgagactgggtgatttacaaagaaaaagaggtttaatggactcacagytccatatggctggggaggcctcacaattgtggcaggaggtgaaaggcacatcctacatggcagcagacaagatagaaaatgagagccaagtgaaaggggtttccccttataaaaccatcgatctcatgagacttactcactaccatgagaacagtatcggggagtgcgcccccacgattcagttatgtcccactgggttcctcctacacacgtgggaattataggagctacaattcaagrtgagatttggatggagacacagccaaatcatatcagtgggtgaggatatcacttaggctggtaaagtatttcaacctagtttatattgraaacaggcctttctttcccttccttcccctttttttctttatagcttctcattcatccatctgggatttacccggtgtctaccatattccaagcatcgtattagatacttggaatataaaaatgaatgacacactccaacctcaggaaatacacagcagtaaaaaaaattttaaaggtgaatcttgcctttgaaccaaacagtttagtacagtgtttattttcagtataaaaactcatatttgtgggacaaggccatcttcatttatatagttcttattccttctctcaaattatgtttcttggccaagtctgtggaactgttggactgtatggcctctcagtcaagccagacacagctgagaggccatcggaaacttgtaggaatttccggtaattggataggaccataatcaaattttatatgaagtctggatgtgctgatgatgtgccttcatttcccaggtcagagggaaaatctggatgccttaatacacccaaaggttaggagaggccttktctgaaattgttttcaaagggatttccatgaccaaaataacataactatgctaaaaattctgtgacctgataagaaatcccttgcctggattcctggcaacattacttaaaactaaaaatgattctctcttctcagaactaacactcagtatcggactgacttatctgacacttgtcatgtacacatggccttgtgtcattagttgtattttcactgctcctgtctcactcccttgactagattataaactctttgaggctaataaaaataatacagacaatagctaatatttattgagggtttctatgtgccaggcagtattctaagcactttatacgtttcatttaatttttacaacaacctgtgaggcaggtattttatcattatcttccctgtgtatggggaactggtcccagacaagttcagtagcttgccctaggtccccaatcctagtaattgacagagctaggattcatgcccaggcagtctgactgtagaacctgtacccttgtttactttattgtttgtcttctctagatgtcttgtgctttactacatgctgacttgcatgtggaagatactccagaaatyaaatcgttgwtttatcagatagttttctaaatgtctcataatcctatcaagtttctgtctatccttctgggtaggagatataagscagtkgttattgtcttaatattctkggtgagagtataaaggataagggtttatttcaggtacagcaaagaattttctacagaaatccctcctcattatcaccactgaaaattcmcagtgcctaagtgcttatcaggttcaaatatgatggaaacctgtcccatctccaaatttgagattcctcttgtacacatctaggacatttgagtacctcctcaaaatgtgtctcattgatctgaggtaacatagcagatgtaacttaggaagtctttattttcatttctttaacaagtaatagtcctttggaccattgtaatagaacacataaagtataatgaccctaagttaatgttgttttatgctttattttctgtaccmtgtttctatcttacatgtctctcactttyccccctttaaaagatgttctagggagtgcctgccactaaaaactaacccctttctgtactttcctttaatcgaactatgaaattttgtgtatttaaaaattttgattgtattttgctttctataatgaaaaccttcttctaatatagaaaaccagtatcctaaatgctaaatgcttaattaaaaaaattcttttacaaatttcttatataaaaaggaaaacctgtgaaaggaaatctctcagctccagaatcaaattaacaaataattttgattggaattatttcatgcagaccatcctgttaacctgcaaaagacaaagtgcattatagtttttttttagggcagtgatgatgtagctggaagttgaaataattggtgtacaaatacatgtgcaaacacgcacacaygcatatgcctgtctgggtcatgtgtcttgtacatatctatttccctaaaggctgataaaaatgtgctcacgaaaagataaaaactaggctttatatggtaagtataaaacatggcatgatgctgtataatactttaaaagagttatgttggtgtgcttaaccaatatttcatgggagaagagaactcgaataggatcttaagctttaggatttctatgaagaaaaaaaaacggagaaaactattttatagtgaagataccaaaatgtggaggtagaaaaatgggggagggtggatttttaaaacgacaatcagaggagagtgactccagtgctsatgggaggtaggcaggaaagagaatgagtgatgtggccttgatggggagcaagtacaatgaagactgccatgaaaattctatgtcagggctgtaggggtggagacagtggaaatctgaggagagcagcctctctgtaaagtgatcagctcctcctcaaatcccagyttctctagatcttcagatttattttttaaaagcagaaatttcagatacaatttgcggttcaataactgttgttaagtaatctaataatgtttaaaaaccttttgtaggcaaaaccatgctcaccaaatgaaacgtatgtctggactggttcctcctgaagacctctagtttgaaacttgagctagaaagaatgaaataattctacattttaattcaaaatgttgtggtctgcctccttagtggggattaattgtaatggaacagaatatttatgccctgcatgatggggacaagtagaaaaatgtgctgaattgatggagaaaactagaacctggcttctgaaactcttggttgtggaccagcttgagcattacctggacgcttgttagagattcagaattttaagctataccctaaacttcctgaattagcatctgcatcttaacaacatcttcaggtgattcatatgcacattaatgttaaagaagcactggatgtagtatacttaatgttcttgttttaaaatagcttctgtaagacacagcatacagcaaaagtttgaagagagagcaaaatctcagagaatctttggtgtaactagtgaaacatgagacaataaaaaggttcactcttactgaagcttgaacagagcagttaatatggtaatgttgatatatttagtaatgcgttcacagtgttaagttttttgcaagaactggtgtgccaagcacaagactcaacacaggttatgcacatatttggtaatcagtaaattaccttagatagtaagtcagttgttgaatcctggacaactgataacatcatttgctttcacgtgttttttcaatattgtgctcagcctcaaatataaattgaatagagtgaccctttgatactctatgaaatcgactgcatttcctaagattctgtggtttcaattaccataaatttttgatattgggtccatagccrttgcattgtcccagcataacaatatcttatcatcttatcattggttctgataatacagtctgcatcagcacaacatattgttactaatattgtatgtgtgtgagcatgtgtgtgtgtatgttcccagtcagaacatcatgtcaagtgcaggagcaatctgcagtttacctagattaaatcgaatcactatgtgtattgcaaaatgagaattatttttgttccagtgatgaaattgtgttctaggttgctagctggatcttgagtttgtgagatggataagtccattagtggttcctcactttattagcaacttaattgtcagaatgtaatgaaacttctgaactgcagcaactcattagaagcaatgaaacacatgacattttttctagaatattcagtgagctactttttcccccaaagagatcttgaaaataaaattaacaattaagtttaaatgtatacctataaaggtaaaacagttttgaattctgccctgaaaaatgttctggataagttagggtcactgaaaagaggggaaccagcatttgaattcctactcagacacatgtttaagtaacctttaatgagttacttagcttctttaaacctcagttttctcatacgtaaaaaggtgatttaatagttatttcaaactatcactatgaagataaaaggaagyggcgtgtggaaagggcttgacagtatccctagtgcacagcaagagcgtatcaatgaccgctattgtcactctttaattttcaacctagatattttaattctcctgcctttgccttgaaataagtttgattttatttcttcaaggccaaagatgtaatcattaaagatcatgtatcccactgtattttctactagaaacaaggctagaaagaaggctgtactttactgccatgcttgtactttatagaaattgttggtgtctaccaaagcaggagtttacttttagttccctggtagatcgtggttgttttcacttggcctttatgacaatattactctgagcactgtcacagaagctcaaagaaaattcttgcttctcttcttatgctttattttagcgacagctcccaaagatgatcttggcaatgtataagaagcagtacaagcattgcaagtggtgattaaacctttaacttatatttcaaagatagcattaggttggtgcaaatctaattgcagtttttgccattgaaagtgatgaccaaaaccacaattacttttgcaccaacctaattatttcctgaagcccgtagctcaaacaaacagtgtgatatgaaaagagtatttcatttccatcaaaaagcgaaaataaaattatggataattccattctccttctaactccctgttctgattttttcttttctttctcttcttattttcatttttgtctatttttttccttcattcaacatttaaataattatacgacattacagactaatgactgtaccgtgcagcgaggattctgtaaacatcatgaggacaggagcagtgtctgttagggccactgctgtgtcctcacatgcatgaaacacctgccctccaaaaaaaaaaaaaaattctaaatctacaaataaatacaagaaggaataaatgagtaaagccaaatgaaacaagactatgaccttcaaagagcttaaatatgtattatggccccttttctttttaaaaatattatccagaattaaagtaaaatgcttgctatatttactaaaggttctattctctctagtcttatttttatgtaagataaatccattttttcttcccttatcatcttcaaacacaataaacttttctttttcatctgtatcccctgtttatatttgctatgattcagtggtttttgattttttaaatgacagttttgtcctagttcagctattccaaattgaaggcaatatctgtgagcctttttatcagctatgcgatagtcaatttattatgtaagtagaaaggccatgtattcagggctaaagattgtgatatggctcatcttaggtaacagattaagttcacatggcatacggtttcctagcgttccttcttaagttatgttcttttattgccagcataacattttgaaaacaattttaaataacgaacatcattagaggaatagtaggaaatttttatctgatgtattacggtgctctttatgctcagtgtctcatttaatcctcaccacaattctatgaagcagatgtctccatttttttctttgagacggagtctcactctgtcgcccaggctggagtgcagtggggcaatctcggctcactgcaagctctgcctcccgggttcatgccattctcctgcctcagcctcccgagtagctgggagtacaggcgcccgctaccmcgcccggctaaattttttgtattttcagtagagatggggtttcaccgtgttagccaggatggtcttgatctcctgacctcgtgatctgcccgcctcggcctcccaaagtgctgggattacagatgtctccatttttacgttgatagtactgggattccagggcccagatgccttcctcaaggacacaggcctgtatatgacagaattgtaacttgaaaccctttttttctaaggctaaatcccataagactttgagtctactactttggaaatattcacaatgggcataatattgataggaacagcagcaaaaaatgagaggtcctgagttaatgtttcaagaatattgaatgctcttccggggacaaattgagcagcaattgacgctgaaatggcactgaattattttgctatcaattgctaaagccttatgttttcatatcgtgtgcagatctattccagggccacctctagctgatagcatcagatctttcacccctgaagagattacagctggctaacattatcctcacaaacagacctggaaagtttgtctacaaccactgatgggagctcaggcaaagaggactctgggagagggttagctcgagggcatcatgatttctcttctgcttctgtggctttgctctagagtctcagaccaatgctgtcattgtttttatgccggttgttatagtctacttgctactgtgaggtgctgtgaggaagaaataaatttaagtcaagtttgtaactatataagcatggtacgaattcagtaaatattgcttgaatgattttatctgagaggcatgaatatttagcactacatttttatataatgctgcttaactcttccttaaagcacataatgatcatgctattttttatgtcctgtaaccttatgggacaactatggcagatttcacttctgcctttttacagatcaaaaaattaaggcccagggaagacaatttgaaagcagggccacaaagttgtgtagacctgggctgactttgattaattatttaatcacactttagctatttctcttcccattttctcatgtatggcatacacaaacacactctggggttctttatttttatatatttttaagaataaaatgctcattacagaaaactggaaaaagacaaattgacttaaagtcatctgaaatctcaccttcttgtaatattttgggattcattcttttaggctttttccagtatccatgcatagatcatggactgaacaagtgctatttgacaactgtcttgattcgtttcataatatttaatggctatgtttcattttaacaaaggtatacctatataattgttttaatgggtatcaagcatttcacagtatgagttccctggttttctttttatctttaaacccaggtactcattgcttacacagcctatggtcagaggtaactctaatgtgatctgtgattctttgtttttaaaggtgttcaatctgatggcagtagtcattgtaataagacttttggctggcgggtgttgccatcatacactaaagagatttcatgacttaagacatttcatggactcacaagtactgaaacagggtatgagtggtaatggaggagagaactgtgactcaggaaagaagactccttcggtcaaggggccagacttggtatgcactggacaaagataaaacatcatgttctgtggcacatgtgagggattctgggcatctcagtatgccacagctggttctcactgatgggcaagccttctccttcagcctacacattagatcataacaaatattctcacctttcctcaaagtttttattatttaatcttttacaggtgtgattcttagtcctggcttctattagaatctcacctgggaagatgttaaaactactaactcccacctccaaagatactgacttaattgctcaagggtgtagggaaggggcaagcatatttttttaaatgcatatgtgattaaatttaragccaacattgagagtcactactttacaagcatctattactctgtaagagtcagaagaaaacctttatcccagtatgaaaccttttctaagaaaaaatatttgtgccctgtttttgtaaataagcctgatttttaaatctattttggctttacataaatacaaatagagttcttattgctttttcctttcatttatttctcacagttgtttattttgtttatagtaatttattttgtctatcatctctcttcccccaacagaataagctccttgaaggcaggaatttttaattattttgttcatcgctatatccccagtgtcaagagtgtccgacacatgctaggtgctcaaaaaattcttgtcaaaatttttgacactaattttgatgcacagatcatgattcctagtcccaggaagcttgtgatctattaaaaacacacagacatgaaaatacaatccagtatttctatggaggttaatgaattgtaatatatttacagtaggttaaacaatgttgagttttaaagaaagcatatggcaaatgtaagagacagagtctttgccacttatttccttttattctcctgataagcaacatggtataatagaaaaactaaggagccaatagttccaaaacagatgtagaattagatcagttaccagaggacattgagaaagtttgtttaaccctttggatgtcaggcttctcatctccaacatcatactgttggaagagttgaccacgcagcttttactattcagtgtttccatgttactacatcctatcgttataggagccacaatgtggcaaggcattaaatggcatgtttttccttttcatcgttctgtaaatcttacatttttatccagatccatttacacctgtcttgtcattttccatgctgttacagggacacgtgcttttttatcctgttatcaaactcacttttaaaatccccctttgaggttattagctgctttgtctaacccaatgtcatatgcttctccactgtgcatgctctccagatatgcatataagtcactgataatcatgaatgagtctgcatttggaattgattcagtgtgaagtatttaaagattcttcacaaggggttcactcagtctggcattaaaagaagctcagtatctaaatcctaggagattgcaaacttgctcagatgctttggaaacctaaacccatgtaaaatacttagatataaagtcattgagaagatgaacttctcatattgtatttgttcggcaagcatttattgacaacccgttgctctgtgcagagcactttagtggaatacgaaagttagtcaaggagtcaaagacccaatcccaagctctaagtggctcctagtttcttggagaaaggagctggaaaggctcagaggattaacatggagcacacttggatctctttcaccctagatggcctcacagaaaggacaccctgcctctgaatagcttccaaccaccttgagacaattttctctcattctaatgccattgccaggatattacagtaatcagatcatttgacgttacctgcatcttagtgtccgcaatcttaatataccatatagatccaagtgtcaggaatctgcagctgcacagtttcacatattatcttgtggtgctaagtctttatgaacaaatagcattgacctctgtgatggtgccgtctaagcacttctttttgtcagcaaatatactatcttatagagaactcacaggttgtaataggaaattattcttccttacataatgtaaaaaacactggttatgcctagggttaatgtagtctgctaatttgtaacagcagagctttgtgaggtattcacagcaggcctccgtgctaaagtcctggtgctgctgttctgattgatcaatgttcttgtgcgatgtttgttaaatattttgcctatcacccccctcctgcttatacctatacgtaaaccatgaaaaagtaatttcttactcattgcaagttccccctcagggcctttggcccttactcttactcttttccctgtctagaacatttctttcttagctattatgctttgctgctccaaatgctacctctttttttctctttctgtatgtatgtgtgtgtgtgtgtatataatatatatcatatattataataatatatatcatatattataataatatatatcatatattatwaataatatatatcatatatttattataatatatatcatatattatgatatatcatatattataataatatatatcatatattatgatagatcatatattatatgatatatattattataatatatgatatatatcatataatatgatatatattattatatattaatataatatattactatataatataattataattattatatattaacaatatacaatataattatgtgataatatataatatattatatgattatattatgtgattattatattattatattatatattatgattattatwatatattaatatagaatatataataaatatattctatattatatataatatatataatatattatatattattatatgataaataatatagattgtcatattataatctataatatattatagattattatattataatatataatatagtttatgattattcthatataatatgttgtcatgtacacatggccttgtgtcattagttgtattttcactgctcctgtctcactcccttgactagattataaactctctgaggctaataaaaataatttttttgtatgtgtgtttatgttttatatatacacacatatgtatactgtattctcccgatgtataaatataaaatctattattatctgccatcctttcaccaccaaactaaaatgcaagttcctagaaaacaaattatagtacatagtaggcactcaataaatatgtgtaaataaagatatatatataatatttgtaaatacgcacataaatatgcatgtttatatgtatctgtaatatgtatgtgtaaaaatgtatatatgtatacttatgtatatgtatctgtaaatatgatattggtctgcatgtatgttcacaaatgaagggtgtgtcaggtatagatattttaattcagctgagtatggattaaaggtgatcattctgtgtaataactggcaagcagtcagtgatcatgtcaaaccatgcctgttaactctagcatctcaaccttaactagtaactgggagataatgaattttatacaaattgtaggaatttttgagtaatatgtatttagtaattttggtaccatccttacaatttctacattgtgtaggcttattgtacagtgttcttcctttttcactccatttgttcatgtcttatctcttcctcagatttgttttcaacaaatccatattttgtctcacttattttgaattcaatttagtgcatgaaaatgataatgttattgktattagcagtaaagataaatcctcactatataccaggcactgktctatatgatttgcatggattagctcagtcagttctgaaaacagccctgtactgtasgtcttattaaggttaagtaacttgcagaaggtcacacaccttgtaagtgatgtactcasgaccccaaatcaggaaatctaactttggagtctgtattttgcctcactgcctatttcaaataatatagcaatattatacggcctttaaaaaatcttaagttgagaaatgcttaagacctctgtgaaaatatatagaagaaaatccttaagaatcatttagcaggtagactatgtaataaaatagactccagaactgaaatgaactttatgataatggtgatagtcagaagttgttgaagaaagagaatgattggcaatataaagactgagctgccttaggactgccaaaaacaaattcgggaagtgaataaccaatatgctgtaatcaacagggaagggcagaccataaaacaactaggcacattaatgtaagatattgggaaaaatagttcacattgaataaataaaaatgtgttaataataactattaagatctagaatcacatgtgttagagagaataaatctagcatagatggaatcatacatttcaacttgatttacacactactcaacagccacaaaacagcaaattacccaaacttgcctgattatcagaatcgcctgggttgcttatcaaaattacagaatcctaggctctacctcccagggcagttgttctcaactgagggcaattttgcctcccagaaacatttggcatatctggagacattttggtagtcataactggaggtgtgctactggcatctagtgagtagaggccagggatgctgttaagcattctaaaacacacaggacagcccccaaaacaaaggattatctggcttaatatgtcaacagtgctgcarcccagaaactcatatctagagattttgattcagtggtctgtgatgaggctttgaaatctgcatttctgtctatggatccaagtttttctgataaaagattggaaacttggtgctatcaatagagttggacttgttgaaaaacatcccatggaagggaatgcttaaggtaggctttgagtagggatagaatagaaacaaaagatgtaaagagggaagaacattcaaatagaagagcaaatcacacccagtaggataaaaaaaggctgtgaaccaacactgggccagccagcaataaatagtgagaatcatttgcaaagcaacctcctctttstgcatggaaggccaactgtgcctcatggcatgtaacttgcatctcccaccttagattttagctgacaataaatgcatgctatgtcattctaactcacttcttagtccccaatatgaagataaaatagcccacgcccactcatttttctaataatatcttccataaaatcccaaaatataaagaaagggagtgagaatgatatttcatcagatatatctggtttaatatccaactctgtctttcattagccatgtgagtttggacataataatagggttaaatgggtggtttccattaaataatgcatgtagagaaattaactcaacatcaggaatatagaaaatagtaaagatcagctgctatttactattattattatttattaaagtaatatttatctaagagaactatggcattatttaaatgaacagaaaaagtacaagttgggatttaagatgatggcaggttcttatcatcaatcacagcaactgattattttgtgctttgttttgtttgaaggggattgagaaaatcctgcttcatagaaatgagtattttaaaatggctccaggtttgaaactattcaccctcagttctcaaggtttttaaaaatctgaatacaatacaaaacgattcaatttggctgcttaatttggtcatggtttccactgtgtttctgtatttatgataagaaagttaacacacgtgagtgtgttttctaaaaaaaaaaatgacttcttttggctatgaattaaggtatataaatacataaaatatacactataatatttataataaatccttataccagctattctagtgtccagagttctatgaaacatagtttaaaaacttctggataagattaatatatattcccagcttgaagatgagtgtgttatatggtatggaatgaagaaggtcaccactctagttcagatagattacatcaatggttttctcttgactagagagtcaatactcctgcatggtcagagagtaggtttgtctggcatgattatctcttcacgaaagcatcttgactctttcaagatgtttgcaaattgattgcttgatgatgtgtcccagtatccttccagacaacagatttgggtaaatttctgcgttttcaagacccatttaaacttcctcttttacaaaagatgatcattacatttacttctatagattcactgcctaggagttcatttcagaattaggccctctatagctgtagctgttcatattctttcttccccactaagaatatatcacttgcttgcctggcctgtcagctggtatatgtgaaatgaatgtgagataattttgaatcatagcctaagctaaacattattaagaagacaaattgtccgaggataggaggaggtgaggattacaaagaaaataacaacaacaacaacaaaagaagaatgaaaatccatatattcttatattatcaggatggattagactctttagttascattctaactcattttagttaagcctctcctatatactaagtatctcaataataatcaaataggtctcacagacctccccttttagatagttcatgaagaagataaatcactaaaacatatgttgagtcagggagatgaatgccaaagggaaaaataagatagggaaaatgtgtagaatgtgtccagagtagttgggaaatgttgcactgagaaggtgacacttgagtaaatgaggggacaaaggggcaatccatgtggccctctggcagaagaaccttctaggaagagaaaacagcaagtgcaaaggcctgaggacaggagaatgcttggcatttttgtggagtagtgaggagatcagactgattgggaaggattcagataggtgaatgaggggttgccagagtcagatgaagttggccaagtgtagggccaccatacattccagttagcctggtgtagtctgggttcatccctgagtagctgattatgtgcactatccgctctccctctcaaaaaaggttctgcttggatgataaattatatggcgatccttggttagtaaggcactcttaagatttagcttttagtcttagagacatgagaagccacrgagggtttggtcagaagaggggtttcacatgacttaggttgcatcaggatcacttcgtcttctgtgttgagaataaaatattgagatgggttggcaaatgggaagccagttaggaaccgatatggtttggctctgtgtccccacccaaatctcatcttgtagcttccataattcccatgtgttgtgggagggacctcgggggagatgactgaattatgagagcgggtctttcctgtgctgttgtcgtgatagtgaatgggtcgcacgagatctaatggttttaaaaacgggactttccctgcacaaacttttctttttttttctgcctgacaccatccacgtaagatgtgacttgttcccctttccttccacggtgattgtaaggcctcccacccacgtggaactgtgagtctaactaaacatctttctcttgtaaattgcccagtctcaggtatgtctttatcagcagcgtgaaaacagactgatagcagaaacctatgggattttcattcgagactatgcaatgcagccagagagttgagttgtttcacttgaggacatgtagctagctggtggtggaaatggatctaggattaattctcctgacttccagtctggacttcttcccacagtgcccagtttctctttcagtttaaacttgagaacaaatagaatgccttgctcgctcttttcaggcctattaagtctccagtttgatggcacaactcagttccttcctcttcccattgtgagaaataggcatgacccccacaacctccccgaacctttttcccctttctcctgaaatagctcattttgcatatattaaccaggaatttttaggactttctgttgaacttctgtatttatacttctggctcttataacctctacagaatactgaatttcacgtgtacagtacatatttattaactcatgaatgtgtgatagaagcaaatcaataaggatggagtctaagtacagatgtgaatatatgttttatgcctgtttaaataggaatatgtgtattaattggaattaaatggattcccatgggtctaattatgtctgtgaattcttcaattttgtttatattttatttccacttgattcttattttatttttacaggaattagccctggtttttgatcgttgctttcctcagttagagtggctgagaggagcaatgtatgtacagattatacatttttttatagtcaactacaattgaatatcagagaatgcactcaaggcattgagatatatatgtgcattagattctgttttaaatatgtgtgcttgagatataaacttgtgggtgtgatatggacagacatatttacacacgtggtatttcaagtagcctgtatgcccatggggagttactcagacagtgaaattaaaatttatgttatttctaccggcccacaaattccagcaaatttggcatccaacagggcaaaatagattgtcatataatgtgcttatctctcatgggaataaaataagaataagctaactctcagggcatatgtaagaaatgagtggacaaaaagcattttataatgtgttacgaaatgtaaggtggtatttattgtcttgatttttttattgcacacatatgcttgagatttcttttctttttccccaccgtcyagtgcccataccttattctcagccctgtatttcatatgacaaacaaaaagtaattgggttattttaaggactcctcctttgagtgaggtaggagctaggaacctctcagtcattacatgtgggagtccgcccacttttggttgggtgtgtgagaaaggggcacagatatactgtcagtgcccacacttgggtataaaagaagcaaaaacaaaacccacagtggattgcagagattttagaggagaaagataacraagagggaaaaaaaatcaattgtttgaatgtgggtattcaaaatacttaacaacctataagcaaaggctcagagcactttaagtagacacatgcagtgaagtggtgtctgttctgattagaatgggttaaagaaaaaagctaaaaacctcaaatcctattccagtagtcaactctggattgttatttttaaattttattgcaggaaaaaaacttagttttctttaaattttgactttactttcttataaatattgaatcaaactttatgcatcagaaccaaaatctgtacatttctgcaaatattttttgctgatccatgcatgaaacaggtacaaggttttatctatggagattcaagaaagrgacacacctctgacccactgtatttcttatttgaactcctgaatctattataaaagttgctttcccatgtagttatttgaagtcctggtggggcctagcggaaccaataatccaaagtagtggataatccaagaatgtcatttatatttggctttggaatacattaccagatgttactctagcagatttcctttcctaattaggcctcacttaaagtaggagttaattttgtcttcattagctgtttccaagtcagcaggatggggcaaggaggaagcctggggcatgctgggtatttggggggagttggcccagtgctaaacgtctgtggtagatcctgttcaaagaacaaaattcaaacacagataatcaagttgatgggaatatacactggaaatgtttatgaacaccttcttgaagaattctcaggcctttgtcaactctttttttttttttctattaatcatgagtgcaaaaaaattccgtaataggaattaggcaaataatcacattaaattttgtacagaaaaaaaattagaggctcagagaggttaagtcacctctcacacagattgatctctaagtacacagtacctaagatactgaaactgattaatgaatgataagaagaccccactgtttccttcttattgatgatttgaataatgaggaagcgagaattcttctggcctaattcacattaagagagccaagataatgaagctgtgattaaatggctattaaactatttttatcaaacagagatcaagcgagtgtgagaatctggggacacagagtgtaattgcaatcctacaggatccagaaaaaattactaacataagcagggcatggtcctttcataatagctcgcatttagaagtctttgggataccgcatgcagtattcactctgcatttctcccttcaggtggcagttagcatctcagagtccctcctctcctccttaatttwgtggatttattgaccctctgtgtgcagttgggtgagttgaatgcactgtctgccacaccatgtataaccagttggaagatccttttgccaactgtgcacaaaggaagaagacccaaatattacaaactgggttcagaattttaatgtagaggtgcccctggctacctgaagggccagaacctatcttctttcaactatgccttttaaatgatgtcagactagtacaggtcatagagggactcagctgtcccaaagagcagagataaaccttctcattttgttgactgttctaaactatcatttattaacgacacggtaacacttaggaattgttgcagattctaaattttgggttgttagtataaatgcatgtgtatcatctgtcactggaaattctttacaccatgagtgagtttttgttgatgtgccttctttcttcctagagcgcccttagagaataaggtgttacagtcacacagacctttatttaggtcggaagaattgcattgtgtaaggagaacccaaggttgacacccaccatgggaaatgctgtttgatagccacagagctcaactgtggaaatgcccgttggcctgttttctacctttccttccgcctctgctgccagctccaaggctgagcttagtttgtgcagctgtagatcactgtctaattggtgacctgctctttcttcctccctactctgcattttcttttcttttttccccaactcggatggagctaagacatatattttttgtaaaatagtattttcaaacaattagaaagcagtatcagagccgagtctttgaaaggttatcttgcaatgtcagtgcagtgactaatgtgtttctataccctgtcacctgtgaacagacatgtgtgagtaggccagtgtgcttcatctgcggtgactttgatttatttgctctgtaaattgggaccaaagcaataatgggaagtgacattaattgtttaacagagtcctctttgtcacatccattgccttctccggggtgtttgattgttgaaactcatgctaaactaattgaaattgccacagtgaggggcaatatccactcaacattatataaacacaaagtgtcatcagcaaatagcaagttttcttcccagttttctatgattaaagaaaacacagacaatttgaaacaataactttttccttccttaattcactaaaaaatttactaaaataaatggtcttggagcacctctgtgagtcacccacatacagagataacaataatatcgaataatcatttgtaatggatacagaccgtaaataatcattacagccctatggtagatactggttgaatagtagcccttactacccacatactccaacacacacacacacacacacacacacacacacacacacacaagccgccatgctaatctcccatcttacaaatcctccctctcattgtgtttccagtagagaggggaattaaaatagttggtggtttaatcagatcttataaattaattatgacattatcaagctccaatatttttgccattgtatttgttatacattctcccagacttattaaagaaattggagaaaactggttgatttaagtgttctttgtcgttttaacttgattggaattatcatagtttgtttacactagggatagagctaaggcgccattgtattatgtgattgaaagcaaataacggcttgtagtattgctggaaagccaaacacaaaatttacatcatagtaaacaaaattatccatttattggtaaatattcttaactctttttcttgaactgtttttgaacatcaatgaaataagcctttttgaaaaayggaatacttggaaaaatgcccaatttactgaaagtgtgtatatgtgtctgtgtgtgcatgtgtatttgatgtattttctaaaattattagataatatggagatagttataatggtgtaaatctcatgactttgagatgattttttaaatacatgtatttcatttaaatataattgtattcagaacagttaaataacctcaatttaatttttgtatgtgggggaatcaaagaagggagttattgaaatctttgrataccagattatgatcctgggcagaaaataaggaatatcatttcagcctatttaatattagaattacatatacagggtcctttcaaaggcatattgaaagaaggtagattgaagaatctacctgagggcctgagggtattcaataagcttcagttattgacttgtgcaatttggatttttacaattggtcagtttatggaagtaggtggcaccattttgaagttaacagttaccccttctgattaggatttgcctcctaaactagaggtttggttgttttttttttttgagacagagtctccctctgtcacccatactggagtgcagtggcgtgatcttggctcactgcaacctcagcctcctgggttcaagcaattttcttgcctcagcctcctgagtagctgagattacaggtatgtgctaccacacccagctaatttatatatatgtgtgtgtgtatatatatatgttttttttgagacagagtctcgctgtgtcgcccaggctggagtgcagtggcaagatcttgactcactgcaagctccaccccccgggttcacaccattctcctgcctcagcctcccgtgtagctgggactacaggcgtccgccaccacgcctggctaatttttttgtatttttagtagagacagggtttcaccatgttagccaggatggtcttgatctcctgaccaagtgatccgcctgcctcaacctaccaaagtgctgggattataggcgtgaaccaccgtgcccagccaatttttatatttttaatagagacgaggtttcaccacattggccaggctggccttgaactcttggcctcaagtgatcttcctgccttggcctcccaaagtgctaggattacaggcatgagccaccgtgccctgcaagtgcattaaagttttaaacttcagacacaccatgttgcacccaaactcaaatccagggacgtgagagggatgcattatgcaaattaaaaaacgtcaattaaagtccctggggagtacaaatggctctttttggcctcttgaatccaaaagaagtccttagttttactgctggatggagggtgatcaggaattaaggaaaacaatttttatgtgaaaatagaatgtatacgtgataaaggcctgcctaatttctctagtaatacaatttgattttctgattagctatcttattctgtgattcttgtaattttgtcaggtcaattaactggagttcagtgctagagagaaaggaagtgtgggtactgctagcttcattagatgtcagcagctaggtgcattttataataaaatctgtgtgggataatttagcccatattgttaatgtcatagcatacagaactttcaaaagaagattttggaagcaggtcagattgaacaaacaatgtgaagtgctaaaagaaggaaaagaaaatggtccagaagatattgttggcaataaatgcagatcaatgaattatttakcaagtaatcattgattagctatgccatgtrcccagtgttggtactgkttgtccacgtgcatagaatatcacacactgccttgttaacaaggtacatgtttggaagtccttgaacattttttacagagtactgaaataaatattatattttataatgaattgtttacaggttcttcccttccacagtagtgttattagagggacagattttgtcttgtttctttttgtatctcccacacttcagatgtccctggcacagagtagatgttcaaaaatgtttgttaagtgaatgattgaagattagctttctatgagtgtgttggtgggaatgaatcaaaaacaaggtagaatatatttgcaggagccactattagaaataatagtgcactggggccgggcgcagtagctcacgccggtaatcccagcactttgggaggccgaggtgggtggatcacgaggtcaggagatcgagaccatcctggctaacatggtgaaaccccatcttcactaaaaatacaaaaaaattagccgggcgtggtggcggacacctgtagtcccagctactcgggaggctgaggcaggagaatggcttgaacccaggaggcggagcttgcagtgagccgagatcgcgccactgcactccagtctgggcgatagagcaagaccctgtctcaaaaaaaaaaaaaaagaaaaagaaaaagaaaaagaaataatagtgcactggaatagtaccccagccacaagaaataagtgcatttaacaaacattacaaagtaagactttattcagtgactgatcacagaaagaagagtaaaaatacgtccagagtttgggtatgaagaattgttacccaaactaaagaagtcaaaagaaatagcagttttgttgtgaaaggtatagagtttgggttttggggatgagggagctattatgaagtagaagtgtccagtaggcagttcgagatttatgactaaagttgggagagatgtcagggagcaaaataaataaatgattttggagtgttcagtgatgagattataattgaaaccatgaaagtgtatagttgctttcagtatagttccactttctggtgttgttcaaataaagagctgtctagacagtttggggggtatgctgtataggagattcaaacactatatctgaaaatgaaattgatggttaaaattctctcaaggtccaagattctctaaatcttttcttttactcagggaaagaaagaaaacatgagcaagtggaaaacacttctgtaaccaagaagaattgcatacagcagttttagcactgacataacaaatcgataaattaggcagctcaaccatcagagattagtagagtagaggtattcattaattgtgtcatttggaccaaaacatgaatttggagtttgagaaagacatgatctttgtgttctggaatgggcattctagatttcacgtatggttcactcatttggtcaaacatgttgatgcatagtgttacctgcctcccagggtcaactcacatcttctgtttttttctctttctgcagaagatagatgaagagaatgaggcaaacttgctagcagtcctcacagagacactagacagtctccctgtggatgaagacggattgccctcatttgatgcgctgacagatggagacgtgaccactgacaatgaggctagtccttcctccatgcctgayggcacccctccaccccaggaggcagaagagccgtctctagtaagaacccttcctactgtttagcaggaattggagttrcctctggctacccgctgcatgggtatgatgtagtcacaataaggtttggattttttcatttagaatgatgccaaagcaatccccaagcacactcagagttgcaaattgtgtgattctctgtttaaaagtgttgataatacacgtcttcgtgtagtcttattgcagttttttttactatcttttgctgttatgtgtgtgtatttttctatcttagtgttatttatgttcatgatgaaaacttagaaaatgttggcaactaaaaggaaaagactaaaaatttcacctgtgatttcaaataacctctcatataaaaatgattgcaatatcctttcaagatatatcatgagcatatgggttcaaatttaaatacatgcataatttttaatggttgcatagtattttattgtatggaaatattctaatttattttgcaatcttttatgggtggatatttagttttttcttctatttttcactatttcaaattgtataataattaacatattagcatttttattcttatacatacaatcctagaaagaattggtagatcaacgaatgtgcaatgttttaagactttggatccatatttcttatgaagattgaaaaactatagcacgtttgccacccaagttacttaaatttatggtagacaatgaagactgaatttgttggaaatgaagagagaattttctgttcaatgcagtgcttgaccagagttttattagttctaagacacagtttaccttctcatctatgatagccatttgtcatttgctaaaaatcagacataaggacatgctgtgtaaattatgggatgccatgatcctccagactctaatatcgtgtttggcatgccatttagaggttgttactctcctatcactaagtttttgaatgttaaaaatactctatgcaaatatatggaggccctactttgagtccattggattttgaggtttctcatatggagaatatctcataagtaattgttatttattctccaatttctccatttgttagtgtcattggctttgctccctrgtaccctgatttmtttccattgatatcagattgttttcatctattcaatttgttcatttgggaagagcagttgactcagagacatactgtatgtcagaacagggaagtccttgagggtcatccagtgaaatgaagaaacagaggtcaggagacagcaaatactttgcctgtgtcagaacccacatctcctgatccacaggccaggactctacttacaaatcctttttttcttttctaaaatcagtgatagtcattcttttatccaaacattctttgaatcagtaatttcatacaccaggttatgaaacacggttcaaagcatcacaaaatctttcatttgttgccacttgacttatttggatttttagaaagaaaatgtgtatctattctcccccaccccccacactccactcccatgtcttcatttagcaaggcagcttttctcacctagtagtgatttggaaattattttagaaagatgttttttgctttatttgttcaaaaaaaatatgtagacaacaccaagtccaatttatgcagtaatcccttatggctggaaattttgagattttccttctacttttcactattatttcttgtataataattggcacatttgcatttttgttcttatgcatacgattctagaaattgaattggaaggaaaggaaatattttcatagttggtagtgtaatgccaaacttttttctactctttaaatatcatatttcctgtagcactattgcgctaaggtgtgacataaataaaatgatagaattaacttttataattataataaattacatttaaaatttcaataacttattccaatgcttaaaagatgcataactttacttgcttttccctttccctgataatgtttctagcttaagaagctcttactggcaccagccaacactcagctaagttataatgaatgcagtggtctcagtacccagaaccatgcaaatcacaatcacaggatcagaacaaaccctgcaattgttaaggtacaaatgtaaattttttaatacaggggggatgtaccaaaggattttgrcttgaagcagtaaaacaaataagtttgtaggtattaattcagctgggaccccgaagctgcctcataatgatgaaatagattatgaatgggattccgtaaacagcgcttgagctrctttaaactaggcagagttcatttacgcatcgtctttgggtgtttggaatggaagtgccactgtctgttagttcttgcccactttattgttacctgcagcattgtgggccacggtaaaatttgctgataagctggtattatctatgagtggctttaagatgcagaattgctgttttgctagctgtctaacctgagaaagattgcttttggaatcaccacaaaacatctatctctgccattaattggatggaatgctggcaatgccataattcagctagtgggctgtattaaacaatgtttgtcttgctattcactgtgagtgaaaacggagcattaaggggtacttaagagagttgtgagtactgggcgtcagcaatcagtggcaaattaaggtttaagccagccgattttttttattcacaataaaggcgctgtagggtcttgttagttacatgttgctgagtaggaacattgaaatgtaggagaaataaaataaaaagctgcataaatgtcattkaggaattttaaatgtaattttctttccttgttctgcaaacagttattcacagctcatagatctagtacacttagactgaacacttcattgaaaaatcccatctctccagaaaacctatatccattctgataaggttcagttcactaattttagctttctttatgccytgtttttaagactgagaattcatggagcaataaagcgaagagtatttgtcaacagcaaaagccacaaagacgtccctgctcggagcttctcaaatatctgaccacaaacgatgaccctcctcacaccaaacccacagagaacagaaacagcagcagagacaaatgcacctccaaaaagaagtcccacacacagtcgcagtcacaacacttacaaggtaggctggggaccaaaacgagctgttggtgagggcactggaagcaaagaaagcacatgcaaagtctgagaacacaccaacttcttgcytccgtcccatcagcgtcactctgtggaaagagaattcagcacttattacagagcgggggaagaaacctttcyttggacacaggttaaacatattctattcagctgataggcagtctaattcacaagcaccaaaagactcctgaaatgttagccaggtggtgaggaattgcaacatcacatgatgtttatatgaatctcagaatagctgagataattgaggttatgaacaagctgggctaaccaattcattatagagcttttattttttcccttccagtaatggaaaaaatgaggcaccagtgatttgttatatacaccttaagaagtagtaaatagtgtttatgcagcctctcttgattactaagtacattccttttctaattcttcttgttctttcttcttctttctccctctccttctttctccttctcctccttcacctcctgctttctccccttcctcttcttcttcctcttccactccttcttccccttctcctccttttctacaaccacatgctatgctcacagattttattctgtaaataaagatttgaaaaatcctgattgttttctttctatttaagaaagtgcctagattaaactaaacatctgggttgrtttttattatcaccatatattgctggagaaggctgatggttctgaggcagatcctggtgatttggggaaaacctctcttggcagagatacaattttctatcttttaggctcctccttctcaaaatgtcgtggtcttagaagcccaaagaccccttgaaatgggcagttgatttaaaacatgccagcttctactttaaccttgtggtggaagtaggcatattataacacaccaattataaacatatacctctttttttttttcactttcattttcccaacttttccttttaactgcagagtgggagccagtgatttctgctttgaaccatgattaattcgtgtaggtatgctgttattgctgctgattcaatacgcttttyttccccagtgttctgaattttcttccctcttcactacctcagtattagcccaggattttcagaagccttcctgtaatattttaaaatggctttccattaggttttccctggtagatatctcaaatccactgcccatcactttctgtcagtttgggaaaatataattagtgaaatggaccgcattctcattgctccagctggatcttcctcataagcactagaacartttttcctggagtagaaccactctgccataggccttgttggtcatgaaggcctcaggtgaggggaagcagatgagctcgctctagtgagtgaacaaatgaattcaccgggctactcctcaccctgtgctggtcatgcatgcattttctggggccaaatttaaagtccttgtaatatgtgacccagcccggcagcacaggttttaaagttgttttytttttcttttagtaaayttttacaaatcatgacaatgaagaattaaataggcctttggaggaaattttctttagatgagactggctgtatttggtatatatctgtggcaaggtacaaaacgctcaccccagaacaaaacctgttgacaaacagacaaaattctttagttatgaaaggcttaaaagaaatgaaacatggctgacaagtaagaacyaataaatgctcaacttcagtgattatttgaattattattcaaaatcaaaatgcggaaaatacatgaacaattagagataactaggaggatcgattgaaattacctttcttaaggtgttgtaatttttttctcactgaacatcacgtatgatctccataaaacgttttggagtcaggttcttttccttaggatgattgtctagccatggttgtgtgttgatgtctcatttatttgttcatttattcatgcattcacccaaataccacaatctacatgaaaaagacacattcctgactttaaggatcctactagtctctggtctaccagtcactggaacagggtggattaaactctcaataaaccaaatcaatactcctctaatggtggaattagagagtctgggtttattcagggatcggattctgtatgtggtttggggactgtccccttcttatggctctcatttcctgtttgcctttggtctcattaactatgactgttgccatctcctctcctttcattgactttgaccttacctgtacccaacaatcagaattcgagagtcttcctttgagcatttcaaatagcctaccctacctcttgaaaaccagaatttcagtgactgattttcaatgtacatttattgtgtcacatagcatatagytaatatctggttatattttctatggaagttgtatgaattatcctaattattagttgagtatcataaaacttggtaaagtttcttcataaatggattctttttgaaaaacttgttatattagacatactcaaaaattaatgtaaaatcagctcatttatctgtgtaaatgaaaaactgaatcaatgtatctaatttgttgaagatatgagcttcatatttctggatgtatgatataccattcaactgtgtagatctaaatctataaatatgcaaatactatttatccaagtaaagtgtctaatttcaggttaatttggacatgaataatattttcacatttcaaaaaaattgattgctggggttgattaawttactttaaagtcgttgaatgcaatttcttttgacaataggataaaggaaacagaatcttggccaactctgtgagtaactattttatggccctgaaaatatcacttagtatcattgggtctcagtttcttcaaccataagataagaaactttattctaaagacctttttggttttgacactatgattttcattacataaataactaccacttgaccttttgaaagtaattattttaatgagaaaaaattgacataaacctacatacacataaacatatgcttatagmtaagcatagatatacataatacatgaatgtatagcccaagtatgcctctcatcatattttcccctccttctgttcaaaatacaagattgccacagagaarcaattgaaattttgggtgagaagattcttaatccacccttcattattgggaaatgcctcctgtaggaggtaagattcagaaaagcacaaaaggcagtagttagcctctttgcaagtctacacacctttcaactgattaacatggtgttttactttagttgtctatcagatttggggatctgaaccccttctaaaccatctggatcaatgcccacaatttgccatcatctctcaattaattttcagtgagtggaatagttactgcatgagctttggcctcatagaaataactattatcagggctagatataaaattatacgttttaggagtaaaatcaactgaatattcataatgttctgtcgccttatagttgctctgctgttttcttgtctaaacaaaccgtgtactgtattccaaattaaaayagaaaacattatttctctctgatggtatgatgcaaattttgtatctgtaacagggagggttcatttttggaaaaattctattttcatatgtgttttcgaatggtagtttactgatgcaaacgctgtttggaatttgttttagcataatggacttttgtctgactttgattcaatattcagagaattccttagtttagtctttgagttttctggttgttttyccaacttgactgttgtggagagaaaagaaatctaaaagacactcmatattacataattagtttcttttttttttctttagccaaaccaacaactttatctcttcctctgaccccagagtcaccaaagtaagtattaagaaatgtaaccattttctgaaagggaagggggttctaatacatttggctacagcaactccatttcagtttgtttttataaatgtgccatatcttccagtgaccccaagggttccccatttgagaacaagactattgaacgcaccttaagtgtggaactctctggaactgcaggtaagccttatatttcacttagaacttgtgtgtgtctgtctgtatatgtgtgtgtgtgtaataagataacagagtgtactgtctrtgtggttaatgaaattaacaaagaatacaaaattggataagaagttatctgcaartatttccagttgtttatttaaaaaaaaaaamctaataaaaaatattgaagcgcttaaaaaacttagactaactgaagagctcttaggcaaacttctgagttggttgcaaatggtgcccttgcactaagtgctttaagtttaggtacttgaaccccaccaaaaagtgagtcgtgggatgtctaaacaagaaattccttggctctggccattgctgataaggttaaaggaacagtacattaaacaagatgctttgaaccagaactatggtgcctacctgcaccgtggtcattgttgctagtttaatttcacactttgtgtttgctaaattaccttcttatgaaaggtctaatgcatgattgcatgacttggtcaagcagtagagtagttaatttcatggtgtagatatatagtgtatgtgtgtgcagactcacacatatgtacatatatacatatttttataggcatgcacacatagacacaaatctttacttataagcatatacttaacatcatttcttaaatacataacactatttcttaaatacattataacttacatatatgtttaggagtagcttttgtgtgtatatatgatatgcagtagaggccttcttatctgaccagtgaggaccagcaattggtgggtttattaaaaaagttgattcaagcttatactgttttattttacctttgcttaaaacacaaaaatatacattcaaatattacagttttggtagaagatggagatctttaccttaagcttattttttactatttgggggtctattgattcatctttcttgtataaaccacactaatatattattatataatacatattatagatggtagccactttttattgcttgctccttgaaggaaaagattagagacattggtatggtagtctgaattcttctagatttttataatttttcaaatattttccaattccacccatccacaactaatttgataacacttcttttagcaatgaccttttttgagttttttttttacaggaatatttttccacactcacatttcattcatttacaggagattttaccatcttacataatttcaatcaccagtacaatgcacatgaactgtttagtctattggggtactgagacacattgataagtagcatgaaagcaaatattatttactggatatgttccaccaccttctaacaaaggtaggcccagaaagcagtttttagtttgttgagtgtgattgtaatagctgtacagatataaattggggaagctgaagtaaagcccaattgcatttatgtaacagaagtgatttagagctttggaaagcaaggagatgaggacttgaaagatgctgaatgaggctagaaggtaaagtttggaaccttcctggagaataacataaagaggagattgagggagatttgttttttctctagagatattctgggcttgaaatgcagtgcaacatataatgtctacaattgtcatctcctctwaaaatcttcagcaaaattggtcgcttagtagtgtttgaagattgtgacaaacactaattgtacctagaaagaatcacaaagggagaaaaagagttatcaaagggaaaacactgcagcatagttcaagtttaaagacattgattggccaaaagagttttttaaaatgataaaggcagttaaaggactgacagaaatatttaggcaatactatcatcctagtgaatgacagaggtgattcatggaaaggaatgtggaggaaattaagctctccataggctaacctgacttggagagccttcagggaaaacaaacaaacaaamaaaatgcacagattttgaagcgtaggggtggaatggagagaagatgttgatggagcagaagcaagaaagcaggaaaccaaagggatgctcagatgacaatgaatttggcaaggactgtgaaatcaataaggagcaacaagatggcacacacactttccctcctggatcttttgattgctaagactcttttctacatccttgatctcttgtacacctcagtttcctccatttcaaagtcatattcataactactgataaaattgtctactcaaaagactaaaatataggttgaaaaataaaattgccagtatgcaatcatttttgacacacaaaaatggaattttatgtggttcgatctgaagtaaaacagtttataagcagcaaagcttcaattaaaagtagtatatcgtgattttaaagagcagayggcatagcttggtgaagtttacaaaaccttggcttggatgttgggcaaacccaagtttaaattctgaatgacctcccatctagtgtgtggccttggtccatttacttaacctctgaaagactaggattcttatgcatgatatgaagatggttacaatacctacatctcactgggtcagtgtgaggattaaatgagataaaatatgagtgcccccttattatataagtactcaataaatattagatatttaattactaattctgagttaacttcatttgcagtggtcgttgtaccttacttcttatctttccaacttttgactggtttcacctcttcccttttattgcccttgctgtgtatcctctttggcaatctcatatatgaagttatttattctttttctgtgcctcccccaccccctactattttcacatcaaattgaacaaatactgcttttggtgtaggtatggaatttaccaaatcaaggcagaacactcactgatttgagattctctcagcaacagctacttctatgactacaatttctggcaatcaggcactccctaaataggtacttcacatacagtatcttccttactttctgcccatttcattgttgaggaaagatttatacgttgacacaagctatctaatggaccctgggttcaaagcaggtctgcctgaagagaacttatatctctttcctgaagtctgaattttaaagatagtaattgacatatgttatgttaaataggcttcattgcacttgccaagtgtcattgattggtactgtctgccaggagcatcgtgttgagaaagattctaaggccaagtctgtgctcatggggaatgtcatgatcaattagtgatgtctaccataggtgcagcaggtgggtggcaagggtagaaatagcatttatattggtggtttgttgatcsttggtctacaggcttaatcagtttgactgcagcagcagaagtgacccaagctttggctcaggccttctggtgtcttctttttctttactctcacaaattttggtgaaattttccaaatgtttaagtggaaatgtaaggagtcaacaaaattctaagacctccagaataatgcctctgccccatctgcagtgtctttgagaaacaggagggatgagataggaagtttgctttattaggtattgccagctggtytgacttctttgtgattgtcctaaactagctcattttggctgataaaaaaactcttctcttttacaggtgtaaaaactaatttgatttcaaaatagctgttagtaaagcaagatgagagaaaagagaatgctcttttggcagaaggcatttaaatctattgcatatggagattttcagagtgctacacttttttgtttctgaaatrggaatggcaaagcaatgtcagctcaacaaggtgacggtttaaaccacagacacgaaggaatttgggtagggaccaaagtgaccccaaaattttatgtatatgtatatatagtttttatttgttattactgtaaacattgtaacagcagtagaactattttataactgataaaatgagaagagcaaaaaatataatcagatgtcatcaccctaaaacaagtaggccttcataatttttttctccattgatatatgtttttccacattattttcatcagaggggacatgtgatttgatgttatttattttttacttaattttttctctacgctttaatcagcagtcattcaaagtgtactttagtagactcacaaataaacaacaacaaaatactcattaaccaatttgtaactaccacttttatgttgaattttacattgcctttgtggactctcaatttaaaagttcactttgctggaaaaatgtactgacaaacagcataaatattgacaaayggctgtagccttttggcatacatactccttgtgtatgtgacatatctttgggaaagtggaccaaagtaaaatatgggtagttgtcrgtagttttaaaaggaaaagcatagcatcagagaactggaaggtgattttgacaggccacataatctattcctgtgcttcaagaatctaagaaaggaagacccaacaaattctttttacagcccattccaatgcttggcgactcttactgtcagagatttcttccatatttcaaccatattcttcattttctattttcaatttcattcattttgacccagtgtctataatgacaattcctttattcctaatttttcttytctggaaatggtaccatcctatttcttgtaagccaaggatagcaaaggaattttctctcccacatcagctttggggtttggcaatagccacctgaaatgccaggttccccttacccatcctctatcccagctctgtggggaatttacacaagggtcaattaatgatatcttcatcttccatgagcaagagttggggaattaggcttatgtcataggaatgttctgaagcttttctccaaggccagtttgttacccagtaaccaggggtgataggagaaatacttaaaatgtactggaggcaggccactcccaaatggactgtggccagccagaggaccagcagggtctgttggatagtcttctgtgccaagtgtgaacacttcagttgctgggtcttgtggagctccagtgagtcctggggaagtaggtgcagaaggagagaacactagggcagcttttatctactgaatattttaacaactgctgtagaggtaacggttggtactcagtgaatatcagctttccctctgcactctygacacccactccaaattcatgaggcctgaaatatgtgagtaggacaagtcacacacctctctttgctcagtcttcctattttggtgtgtttttaagcaacttagaaactcatctcctaattttttttttcttaaatacctgaattggcatgcaacatatgcaaaatcccactgttaaacaaacttgaaagtaagttgcagattttgcagtasattctgcaaaatgttataaactccaaaaaaaaaaaaaaaaaaaaaaaaaaagatgccwttggkgaatagcacatcacaagaaacagagccagggactcaccatttatcagagtcattcaattaaacaaacaaacccaaaaraaaactcctccaagaaaatcgtttcatagcgataatgaaaaacaaaacaaaacttgtctttgccttttttttttaaataaaagggctgtttaaaaagatgactgtagagtatgtaccacttctcccagatttgctgtgcaraagtgcgtaagtgtgagtgatgtagaggtgcttgtttattatggagcacatttcaatgcagtaatcataaatattgctaaggttgtgctctgttgaaatatgacctacatactcttgattgtttgtgttatgtgatttgtctgacacccattacattctgggtaatagcagccatttgttgctctgcacagcaggctcttttgacaaaagaaaataggcggcaataaaaaagctatagtctgaattacattctgcaccgagctgcactgctgagagtttgtgcaagtgtgttaacaatgctcggaactgcctcttgtcagccttcagcctgtaatggccatctgtcctcacataaatctgtcaaaacctgctaagttcaagagagagcatggaatataccttgtactgtcaacaccaaaatgtacacattccccagaaaatcaacacgcaggaaataatccagaggttatgggaggcattagcactgttgatttgggcttgtggcatgaaatcgagagtccagagattagtgggaagatgagcaaaggtagtggcatcaagggattgagcactgacctccctcttacttcaggggggaaagttgtgggtagcggaggtgaggctagagaaataacaactagttcagaggcagcaaggggttgcctgtctcatcagcagctctgaaaagtttaacactatgttcaaagaaagaaacatacttcttgcacctttgttttgttttgtttggctttgggtctcaactgtatctggagataggctttccattagggaggcacttggtgataggaaatcttgtcatccgtgagatttctcaatcttgctttgagatattctccggttagagatgtttcagtaaacaatgaagggtttagggaattagccaaattatttttctctctccatctactcactaatcttgaaatatcttccattcaataagcaaatattacctatttgtttcaacaaatggtgcccgcagaaatttccagcccttatatttttactcacagggcatatttgatggtctctgggtgtttccatcaattttaagtgtatatgcagaaaaatatacttatgtcaaattttaaagaagcgcttttctattaaaatcgattgtgaagtccctggaggctgagtccctgaaatagcagtatctggtgtcatatccagcacatagtaggtgttcaacgaatgtctgttcaatggccacaggctgtctaatgtgtgacagaggtaaaaggctttgtttttaacccaaagaaagtacaatcaaggtgtcgccactccccagagcaacttgagaaccagttatttaagcgataatgarcttgggtactaggacaagggtttcaaattttcaagactcagaaggatttctatatttgaaatcyctagatacctgagctatttttagaaccagtcgctctttaatagtggcctaatttggcgttcctgaagtttaaggtttctttttataaatctaaaatatctgtcaagatatgtatacctgagagtacaaagtggcgtgcggcagacactctagggctggggttctcagatgtggcctgtgaagcatctcattaaaaatgtttaccyrgtttcccaagtgattcttgggctgctgaaatgtgagacccacgactaaaggagaatctagaaaaaataaaattagtacaaaataataatgcaacaaatgtgcccaagcaacatcctgcaaagcgcttataaytgatttggaaagacaagacataattcacattcgaaaagagataagcaaaaatgtatagtaatatgtgattggtatcaatagagggatcctgacagtaaattactaaagaagtaaaaattaccctagcttggggtgatcatgcaaagatttacggagttggatatgaggatgttgaatgccatttcctccaattcaagggctatgtcattggacatatttgattggtatttactcagcaaagagagattattcctcattatttctttaagtatcttaggctcctaggaggaatatttgagaatgtgctttttttttatctcgctgggaattgcaagtggtaattgaaggtagcatgtagaagaaatcagtatgcatgaataaggcagtgcaattcgtaaataaarcaagtgaaaatggagagaaaagataagattgaccaaataggaatttattaggttgagtaaaagacatacttatctatgagagaggaaacaagagttgagtgtgcctcagtggcacagatgtttcattcagtcatgtaagtcacttcctttgctacagcaaagagaagggcaaagagccatccaagagcagctgttaacaaagggaagcctttttgagactcaggtgtgaccatgagtggagtacagtgtcccattcactttgtgtttgcrtttctctgtctttctgagattttctgagttggaactccgaagtcaaaccaccttgcatttgtataccttttcttctctcagggagaattagctttgaataataaaaattgccaaatattggtgtaaaatatttcactttagagaaaacattcattctttccatttcttaattataaagtrggagagtgaggcagcatcttcctgttcatatcaaaatctcatgtggctttctgtgacctacttggctctcgatatatgtgtgttgtgtatgtctgtgtttattttttttccagcaaggtagcatttttttccttgcaacttgccttaagtctaaccccaggcttgttagcagacttgaagttctttttgctgaatggtattcaccccgcctcctaaayagaaaatgtattgtaaactaaaatgctccattgtaagcgtaaactcatttgaactccagcctgcccttcttcaaagttccttggactctggagccacttgacaatggttcttcctcggcacaaacggatgagtagggcttacttgggggaaaactcaacagaggaaactactacgcttcacggactctcccacagtggtttctgatgaaatgttctgccctcctatagaaaagcagaaagagcaacagctgatggctgttcctctttcttcctttttatttatttaattagttagctgctgaagcttggctgagtttcaatccctcagtctcataaccctcccttatgttgtgctctatataaaatggtcggctggcactgygatatttagtgttactgttcacttaggtttctgttgcagaaccatattttagacagaatgtattagttatgcttacaagaatgtattatacctacattagccatggtttactaggttaatgaactgtggcgacaaagaatcactgccgttaagttgtagagttgctctaggtccctgcattcggctgtcrtatttcactgaacttactttgaagttgcttatgtcactctcaccattgccccatatttcctgtcatcccatctttttttttttttttcttctaagttgcttaattccttggctccaagggtagattctcttgattggacaaagacccctgagctgcttgcatcctctgcaatgttctttgcagacaaatgctaccaaggctattccgtgattcctcagtctcactttgttaattttccataaagcagcccatacaatccccttgaaaatgcaagctttggtaataatgcctagttccgtgcaggccaggggtgatgcattcatgttttctgggaagcaggatttgttagcattggtgtttgaaatacaaaagatcacagcctcctgctcagcactgtagatccatcttttcttggtgacagaggcttaggggatgagtcagtttttcaggccttgtcatgaaattagtttccttcttcttcactcagtttgaacccttgtctgaaatcttggaaaaattagaaacatgtgtcttcgcatttaagaacattatctctgtctcttttctttctctctcttttttttttttttttaatttttgccttaggcctaactccacccaccactcctcctcataaagccaaccaagataacccttttagggcttctccaaagctgaagtcctcttgcaagactgtggtgccaccaccatcaaagaagcccaggtacagtgagtcttctggtacacaaggcaataactccaccaagaaagggccggagcaatccgagttgtatgcacaactcagcaagtcctcagtcctcactggtggacacgaggaaaggaagaccaagcggcccagtctgcggctgtttggtgaccatgactattgccagtcaattaattccaaaacrgaaatactcattaatatatcacaggagctccaagactctagacaamtagaaaataaagatgtctcctctgattggcaggggcagatttgttcttccacagattcagaccagtgctacctgagagagacttyggaggcaagcaagcaggtctctccttgcagcacaagaaaacagctccaagaccaggaaatccgagccgagctgaacaagcacttcggtcatcccagtcaagctgtttttgaygaygaagcagacaagaccrgtgaactgagggacagtgatttcagtaatgaacaattctccaaactacctatgtttataaattcaggactagccatggatggcctgtttgatgacagcgaagatgaaagtgataaactgagctacccttgggatggcacrcaatcctattcattgttcaatgtgtctccttcttgttcttcttttaactctccatgtagagattctgtgtcaccacccaaatccttattttctcaaagaccccaaaggatgcgctctcgttcaaggtccttttctcgacacaggtcgtgttcccgatcaccatattccaggtcaagatcaaggtctccaggcagtagatcctcttcaaggtaaaccttggcaaaaccctaataacacaaaaggtgttcctaagaagtaaaaaataaaataaaatacaaataaaaatttgaaatctgcagccattctggcccctgaccactgcaattctggcactgctggaactaacgagaacattgttacactcacatctctctccatgttctcttaaatctgtcasctctgagcacagtgccttgagccagtcctatcagagagagcaatttgttaagaaacttgctcatccaactttttccattacctggagagctgccctgtgccaggatagtggagatccatgcaagataaagctgacagtgtaccagacctggtgctcagtgttaacatcaataagagacgctgagagagagcacatcactcccagccctctaagttgactagatgatcacaaactgtcactgggaaatctccctagtagctgggaagaaaaagccagtctctgtaatacagtgtcccagaggatgctccacagtgccgataaacttgggttaagtggcagttgcaaatgccctttttgcttttctcctctggcgcagatcctgctattactatgagtcaagccactacagacaccgcaygcaccgaaattctcccttgtatgtgagatcacgttcaagatcgccctacagccgtcggcccaggtaatgaggcatgtcattttcctttagctccctttatcccctccttgagatgacaagatgttctccaaarccctatacccctccccatattattattcattttgctcatgaaaattgaggtggttgacttagtgataaagttatgtttcccaggtatgacagctacgaggaatatcagcacgagaggctgaagagggaagaatatcgcagagagtatgagaagcgagagtctgagagggccaagcaaagggagaggcagaggcagaaggcaattgtaagtggcctggagctcacttttattttaaagtagggtttcttctttttctgtgtgctttttttggtgatagattagaaaataaacaaaagctaagtctttgttagaacaggccattttcagccttttggctttaaaatatccataagtcttcggtccccattgacctaacttattggaaaacaaaatgtttaagtcagtatatttctcactcacagtttcattttgaagttcattactgttttcaccttctgttttgaaaaatggagggagtagagatttttttttcagtcagatatttgttctttctgatcacaggataagtttttctttctgtttcctgttacttctctctttgagcggaaaatgaggagggattgctatctcgtttcagtttttgtctttttggccggcaggagacttaaattgtccatgaagagactgagttcaagttggatttaaaggagcagtggaggaagagttgctaagaaagtcatcatttctggccaggcacgatggctcatgcctgtaatcccagcactttgggaggccaaggcatgtggatcacttaaggccagaagtttgagaccagcctggccaacataggaaacaggaaaygacataggagacaggaaaccctgtctctactaaaaatacaaaaattagccaggcgtggtggtgcatgcctgtaataccagctactasggaggctgaggcaggagaattgcttgaaccagggaggtggaggttgcaatgagctgagatcgcaccacggaactccagcctgggtgacagagtgagactctgtctcaaaaaaaaaaaaaaaaaaaaagtcatttcttctgcgtgatggtcgtcatctaactgggtaattgacacacccacatttcttatgaactacttttcaatgacattttatggatttcagcaccacttaccagggggtattatattaacttgacatatagacagtgctgacccttctgtgtaaagatccacgttatgttatatttgtttgctgtctgaagatcagtcctcattttcagcagctgctgactagtgggtaggctttaccccaactccctaccgctgtttatcaacctagactttggatggcaaaaataagtcagtccagttgtcaaaatccagcccatgcccatggcaracattcctaatcgataatggaactctttcccattgagccccctcagagccttacggtcttttctgacatgrtgctctagggagccatgactaatcaatgagatatagcactgcttttattcagtgcagctgctccctgtgtgctagccactcagagttagctcagtgaagatcagcttttgacatatcttgcatctaagctagccaaggcttagggaaatgatttttgactgtaaaggttagatttatgtgttatctttaaaaaaactcactaacatcaacacaattttgcaaaagctatataaaagagctgactaatggaatcaaaatcaagcattggccaacagttaccagctggaggaaaaaggttaaatgagagatttgttcaacacaggcacttaaggagaaataagtgagaagtaaytgaacacttaggtcaaagttttggagggtttgctgccatttaactttgaatctacctaagactgactcaaaggcattttgcaaattacaacaatttgcctcatttttctcaacttccaratgagcagtgatattaagatttgccaaagtgtcattagttaacacttacgaagactaatgaaaattaaaattcaatttttctaatatcactgtatttaattaatggcctattcaataattataataactcacatttatatagtgccatataatttacaaagccttttaatatggcacattataatcattacaaaagaaaatcatgctgagcgaacatgtaggaaaatgattattttggtgtttgcaaatttatattttataaaatccttcatttttcccccaaaaataggacattaaagagaaagattaatagtttcatcataaatttgcttatatggccatgacacaacacagttgtaactaaagccagattaatattttaatcaaaagcatgtaaataaatgatgtgtttattttatgccttctaaagatgattaagtgccagatattaataaagaaaggaagggaggtgtcttttttgttgctagttcggccctttacagatagagcaagtagtgtcattggtctagatgacacaaaatcaccctgagggtcaccagcctcagcttggaagcagatgctaccctgttgtccctttgtgttacaaatgttgactagttcctctgttaattcttagatgaaagtaatctgtatcagttctcttccaaagagcacttgtaatacaagtgtcaacttgatttttattaaatcattttacattaactagacatttgtgagaattttggctttaaaattcgcttttgtttttgaaaagtagattgaaggaaacctagaacatagagattgtttaccaacagagtggactataagtgataagtgcttaataaagatttgggacttactgtttaaccaatttccacttggacaattacatgctgtttctattgaacatgagtgaaagctcatagctctttctgtaataaatatttgccatttggttgggatataaaattaggaaagacatcgtccctgtatccaaggagcttcaaccatactggcagataaaaatacacaaacaggcaatacagtgtgataagtgctattataaggggtgcatctgtggcactgttggggtggtatattgggggcatccagatctatatatgaaggagaacatcctcagagagrgtataagactgatccaaatcctaaagggagaaaggacaaagattttctccacctgcagcatccaatatggtagcctttagccacacggttaatttgattgggccatattaagatgcactgtgtgattggatttagaagacttagtataaaaaaatagtgtaaaatacttcatttatctttttatatcaatcacaaattgatataatagtttggacatgttgagaccaatacaatatattattaacattgaatttttcatatttttactttttaaaatgtggctcttagaaaattttacatgacatactgcattgtatgattactggacattgcttttttagacagcggctatagcttatactaagtctctaaaaaagaataaggtatattgagaaactactagtcgtttaattggaacactgagacacaagaggggcaagaaataagtctagagggaatggtggaagatagcctaaagggtcctataattcatgctaaagattttgaaagctatcttgaaggcatcatggaactatttaatgagtttacctacatgaattttttttattgattcccttcctccaaatagttagctttctagtaccataatgcatccccaaagtatatttttatggacttgagwgcagggatacatgcaatgatttttaactgatttgaaaaaattagcttgaaaattcatacatagaagagctaagggaacaaggacagtccagacttaagttggtcaggtacatgatgttctttcaatgtttgaaacaaccttaaagtaatgagtaagaagcaaattacatttaagatatcttggggtcagtgttgggttrttcattaatcaaagcaatcatatatttagggaaccagaaaaacagagactccaaaaggcaatgaaaaaaaaaaccttcagaaatttaataattgttattttacaaaattaaagtcatctttttaacctttgtctgcattacttctattttgagttccataagtaggaggtgttttaggagatctataaacttttcattgcttatgtttctaaaatcctaattcagcccaagttgagtgagccaaatccaaaaacaaagagaacactaataattagtaattaccaatgcaaaatcttatattgtggttgaatgttaccattgtttcagttggcactttcctgtaatttccatcctgactctttctcaaaaagcaattcactttctgcctttctcagactcgtaagcttgaaataattcaggttatattgggactctgcaaaccagagtttagtacttartgtctaaactrtcactgctctaatttcttgtggagttctaagtccaactccatttgcaatctgtacagttttctgccagaaaacatgataatgggatgttaatttaaagggcaaatctagacattgtgatatggctcagcactcaaaaccaaaactagatgtgctcaggcggcaatgactgctgcttcacttctctgttggtcagtgtccagctcagaagccagggacagtgtagtactgctgataattataaacttcttccaaatgaaatgaaaaaaattgtgcaattactcagggttttttttttttttttttgagatggagtcttgctctgtctcccaggctggaatgcagtggcgcaatcttggctcactgcaagctccgcctcctgggttcacgccattcttctgcctcagcctcccgagtagctgggactacaggtatccaccaccacgcccggctaattttttgtatttttagtagagacggggtttcaccgtgttggccaggctggtctcaatctcctgacctcgtgatctgcccacctcggcctcccaaagtgctcagagttattcttttttggagaaaatgaaatagctttctatgcaagcctctttaaagagatattttgtgtgggtgagtatatgttatattgkgactctaagttcaatatttagaaatattcagttttatggaaagatgaataattatagagatctgctatacaacatagtacctatagttaattatgctattgtacactttaaaatgttgagaggatagatttcatgttattcacacacacacacatacacacacacacacacacaaaagaaaaaaacacaacacaaggaaattttggaggtgatggatacatatagtaccatgattgtgatgatggtatcaaggatataggcatatgtccaaacccatcaaaatgtatatgtttaatatgtacagttttttgatatatcaattatgcttcagtgaagcttttttaaaaagtagttatgcatactcttattctataattttcatgttttctgacttaccagtatgtttacttgcatgttagcttttatttgcatcttaccttttaaatagactaacctggacttattcacattaaccagacttagacactaagcagggatagtagcacacggtacgtgaatgggggacactttggacaaatttaatgctacaattttgttttttctctaagaacaccccctagtagtaggcatttattgactacctaatgaattaggttagataatcaatattaacggcaagaaagaaaaacacttctcagcattttttagaatcttggtatatctttctatctgtacctttccatgaccctccactccactcacctcttcttttagttggaatacaccatacactcaatttataatatctttgcaatttttgaggcagtcaggttacagctaatctaggaatgaacactagtatttcactgccaaagttgatatgtagtttccttagcatagaaaaaaagatttttacattattctgacttgcaaacgtagagagctgaaatctacattatatcaagctcttccttgttacctaccttaaaggacattttagagagatcacccattaaaagcattaaatgcagtacttggcatagctaagagttcaacaaatgttcatctctctactaccttctgtcttttctttgtcaaaccccttttatcaggagtagtttatttgatgagaaacaaccactgtatgttttcctccagtaactgggaagctctagactctttttgataaagattttagtaatgtgaagtcagttaattcagtcagtttcttgtttctttatttatcccccacgttttggtgtagtgaggatttactatagatgttaatgcaatgtaagtcttcaattttattatccaccccatcagcgtactagcttttatgaaaactgaagctaaaagttatttgataaatgtaccatcctcctcaatagtgaaaactggtccgaaaatcatttttcgaggagctgtttccaaaggtttagagttcctccaagcctttaagaagttgaaaatgtcattaagcattttgatttcttttcctttcatctcctgtttagaaattaatgtcttgaaaaattggctgcaaatgttaagcttttttaaagatatgaaatctattcatctgtctaatacaactgcaacatgtttaaaagaatcagttctttgctagacattttggccaatcttagaaagatttttgtctttgctttctaggcatttggatgccttttattttcatttttagcagtaggaaaatcaagcacttcaataattttctcaaataagcctttcaacatgtattcaatctctgatctttgtaaggtagtgaggcatggccccattcctgtgtttcataaaaagagatggtagaaaaataggtaattcaagtaattgtggaacaccccttcggtttcctgtttctcccctctaggttatatcttctttttactgtagaatgtatcagtatccattataaaaggtcctctggtttatattttgtatgggatcgttgttgcatacaacttcgtataaagctgcaattcagagactgtcccagtatgtctgcatatgggcatacatatggtcgattttcgctttaacttcaaatttccttgaatacataggctgtgtttattcccataatggtagttgagcaatttctttgcaatgtctcaatttctttctctcacttctgcacttccccctcctctctatacagtagtaacttttctaaaaggctcattaaaaaaaaattccttaacacccgtgaaagcaggcgccaggaaatttaagtttagatagcagtcccatcacatttggctgtttgactagagctggctgcataaacagaatggaatgtggtgttatgattcccttgctcaagtgtgtatcgatggtctgggatgtgcctcttcatccatttctactttctgactgccargatgtgctcggtgctctgaagtggcacaatcacagccttcaattgagacatacaatctacatggaagggcgtcaggcagcctgcactggttactctgcttcatctggtcatttatttagtctcaatgctattgttcgtagagttctgttttaccaactgtttgttatctcctacctttgattttcagaggtgatktttatgagtgagattcctgcaaacatgtagctacttcttacacttaaatctgtaaaaacaaattatggaaatctttgtttcttcactcagctgagctacttgagcaaggtttttttttttttctgtgataaaacaccaaatctaacttyccttctcctttgtattggagagtctcagagaagaaggaccactcttagkcatctttgatgtaatgaagggaatgggataagtgttcaagatgattaattgattagtaactgattgattttatagcagatattcattgatagtctgttatgttttgatgctttgtttaaaatacagtagtgaatagaacagatatggtctctactgtcatgaagcttttattatcctggggaagtggacattaaacagtagataaactattaattacaattggaaaggagagttttccataagagcaactaataggaattctgacctcactgcaagtctcagaaaaaatgtgattgttgagcttaaggttgttgtagacagtgtgtgtatgtgagaggcttgggagtggtgcagtgtgaatagggtgtcccagtagcagggaaagagcatgtgcaaaggctttgggaaggaaggtgcacagtatatactagactaatagaagctcagtgtggctggaaaagagagtcacagaaagaatgcgatataagagataaagcccatgatgacaacaggcccagaccatacagggccttgtaggtcttgttaatgatttaggtctttcattaaaagttatgagaagccattggaatattttagaagttaatggacgtcattggattcctgtttccttagcaaagactatcctaacaacaatggaagaatagattggagaagaataaacatggacacagatccaagttaggagattgtttgttatactagtccagaaagagaagctggaggcttggcttaggacaatggaataaagaaaatagattacagagagatttaggggataaaaattaataggacttgagtggttagacatgtggagaggaacaagagaaaggagtaaagggaggtagttaaatttctgtcctaaataactggctagatggtgttcatttcactaatacaagaacattgggaaagaaccaaatggggagagggcaaggctggagggtcgggcttcggtaatgttggtgtagtgtgaggttcctcaggcacaaccaacytgagatgtcaagtagacagttgattatttgcacctgaggctcagatgaacttactttcctaataaaaaatagaggcgagcatgttacatgtggtagaataagaccagacattggtaagcttatcatccaggaagataaagggtctgcaaattgttcagttacatttcacaaatgcttgtcgggtgcctactccttaccagattcttggccaaatactgggcataagaaaaggaaaaccattcagtaaataagaaagggcatctttttgctttcagyccaaattactcttttcatcacccaagaccagggactctcagtacatccaaagaaaactcttgggcaagctaagtctgtacctcagttctctgcttctagtctttgcttcaacctagcttaaatctctgcaaccttaaattcattttatcattgtttgtccttagtatacayacaaactagttggtgagcacattctttatattaactccttatgttcttaaaactttgagagacatcataacttttggccttatcttcttggaacaagaggtataggattgcttcttacactaagaatgcatttctgtgctgtaaaaaaagaatttatcctcaggctataaaatattattcctgtattttgtaggttataaattactgatgactttcagactatgatgatattgactccacttgtgaaaattaggccacacccctctagtctgttcctaaaataagactakatttattggcaaagtgaaatttatagcctcttttatttagctcttattcttcggagactcatggcttaaaatggcctacattttaagactgtatttcttaaattattgtctttggaccacctgcatcaaaatagctgaggtgtgcttgttaaaaatgaaggttgtagaaccttatcttacatttttttttagtacaactagataaagcccaatcatttgcatttttaatcagcaccccaagtaatttttatgtatagtagagtttaagaaccactcttttgaggacgtcagagtttgttcatctcagtattagaattctgagttaatgagaaatgtaatagttttgtaagccaggtcagtttcataacaattttgattcataatcaagtcacaaatgttcaaatatttaataggtattgttccatgatttgaaaaaagaatgcactatacagatttcttttctaacacatcaagttcatctgagagtagaacagagacagataggaaaggtagaaaagagtagaggtgaagagaagaatctatgtgagcaagaagagattgatactgaagaaatgggaattaatacttggttcaaatgtagtctttccttccattgtagtgtatgttttgctctaattgccatgctcagtggggtttcttatgcatgattgtacatttatgaatgtttctagagggttagctttttttttttttttttttttttttgagatggagtctcgctctctcgcccatgctgaagtgcagtggcacaatctcagctcactgcaacctctgcctcccgggttcaagcaattctstgcgtcagcctcctgagtagctgggattgcaggtgcccaccaccacacctggccaatttttgtatttttagtagagatggggtttcaccatcttgcccaggctggtattgaactcctgacctcatgatccacctgcctcggcctcccaaagtgctgggattacaggtgtgagccactgtgcccggccgagggctagcttttttcccactccagaactctctccttccttccccccataggaagagcgccgtgtgatttatgtcggtaaaatcagacctgacacaacacggacagaactgagggaccgttttgaagtttttggtgaaattgaggagtgcacagtaaatctgcgggatgatgggtgagaatcttcaagattatttcttgtttagaagctgacgtatgtaaaaaattatggccataagattactgggatgggagttgccaatgtaagtgctttgacagatgacatgttgagttcagaaccttatttattttctttcatccctgtttattaatctttctasttgagatttcctgtcccagaaataartatttagctgcttgacaggacaatcacactgataaatggattcagtggctcagacgttggcactggagaagtctcacaaagtagaaagggttacagtcccatatactaatacttcttaaccagctttgaacttttctttgtccgttgcagagacagctatggtttcattacctaccgttatacctgtgatgcttttgctgctcttgaaaatggatacactttgcgcaggtcaaacgaaactgactttgagctgtacttttgtggacgcaagcaatttttcaagtctaactatgcagacctaggtatggattttattgtacgtggaatgaggaatccataatgtagagctcaagatgggaacaaacataatccgtaggcaccttgggttgaaccatcactttattttactaaagggaatgtttgaatacagatttttaagaaaaacgtrtaagacagtttcagaagaaaggggcctaggttttggcaagaaaggacagaagtaaattctttgtactatctactcaggtgctgaaaattgtggtaggtatgtatgtggatattgtgtgtttccacatgtgttcatgatttctgtatgtgtgttgtgtgtgcatgcagctttatattttgtgagtgcatgtattgtgtgtatctctgtggatattgtgtgtgtctgtgtgtgttgtgtgaatattaaacatgtatgtgtgtagtattgtgctttgtgtgtgcgtgtgttatgcagatgtgtgtggctatcatgtgtctttgtgtgtgtatgtatgcaggtattgtatgtgtctacatgtgtttatgattcaygtgtgtgtgtgtgtgtgtgtgtttgtaacctgattttgccttccaggcctaccctgaatcctttcacgaaccatagcattgccatcattgttttatggaacagaatatgcaagtctcattttctcttattatttcacagacacttagaaatatcatcattttctatgaactacaactaagagagaagaaaattaaatttcatatactaaatcacactctgctttctttaaaaaaaaaaaaaaaaagaaagaaacacctgttatttgttgagtgcttccatatgccagacactgtgccaggagctttgaaagcattttccatttaattactagaactatcctaggaggtgtatattattactatcatccccattttacagataaggaaactgaagcatacataatattaatttttcctgttataaaagctgtacagactcaaggggtaaaatatggtaaatataaaaaggtattaagaaaaaaattaaaatcatgtatcagcctgtcatccaggaataaccactattaccaacgaagtgatttgccttccagtattttgtctcagcatgtctaatttcttacagttgaatttatatatatatttatttatatatatataaacttccaaattctacttttctcaattaatatataaattcrtgttctgctgtgactcacaagattaaaaataatttattaacatactttaatggttgtacagtattttgctgagtgaatagtaccattatatttagtcattacattatagccaaacatttaatttttaatttttcaatattataaataatgctaaaatggacatcttaatttcctttccaattttaattttgttcctttgcatgtcattccccatctaatgtgtgcatagtaagcctttaaattctttgaggaaggaaagtgayaagtgtcttgtgcatatgacataattatattaaatttatttgtaatatttatcatgaaattaacatataaatctagtcctcatcattattagatatctatatgcactttctctgggttggtaaaaagaaggaaacaaatacaaatacagggattttttttcttctgtccaacgaagggatgtcttcctagagtaattgatacaggtgatgtgcattgttcacagggaatatgctataattcactccacaagctaaatagatagtaggaagcagtggagaggcagctgactgttagagagatagcaggctagggatgaaaatatagaatgtggcaagtcatttgttcaaatgttggctgataaaaacagtcaagacggattgaagtcttgagttgatttgacttattttcttcagtgatgaaggccagggtgtttctagtctctcaaaacatctagagtttaaaataagctacctagaggggcctttagatcacgattcatcactggtagagagggaggattggatggtatttccaaattgaactggagcctccttgaaatatttctaagaaggatgcttcctctctcgttatctccctgcctagccggcagcaatagaaactttgccattgctaagctcgctctgtattttctgaaaagtatgtttgatgtgcattgtagtaggatggatttttccaattccctcaagctgtacgatggcacaaagrtagtttttttctgagctccatcattgtatagtctgaagaggccaggctttggaatcccgcagacctgggattgaaatctgacttaccactgccgttgggcaaagaattcaaccccttcagttctgcttcttcatttgtaaaataccatatagtgttattgtgaagattaaataaatgtttgtgatgctattagcacgtgtctggcataacataggtgctcaataaatagtggctatggttataatttaaaatgatgggaatgagaagttagaagtgtaaagtcgttttaaaatggaagaatcgactctaggaatcagctttggaactcaaaacatttttcctgtgtcttgtctttgttccctgaagaattcaaatattcttgtgctcaccatattcagtgttcatgcacatttcagggcataagaatatactggactcaggggttaggagcatacacatatgtcacaatagtaaagcaaaaatgatgtgacacagattagttttaccaagacaggaaagttacttatcattctagatagatttaaccaattttctttctgtttacttgctcccccaaattaagttagcttatacatcctatttctctactactgaaactagataatggtgactacaatattgttagagcaaaacataacgatttcagctactatttatgacccagtattataaatgagagtgagagattaaaatgacttgatcaaggttaaaacagtgaagcccagatttaagttctagttgccatgaatcagtagtctgtgtgtctttctatttactgtcttataagcaaatggatctttctaaagacctcaacgaaaaaaaatcagaggggaaagaccaagagaaattaaagtaggactacaggatccaaacagaaagatgggtcagtattatgaatgtaatagttttgattaggaattagttatgttacataacttaaacatttaaaaaaataaatgacacatacattataaattattcattaactgaaatgaatgtattgtattatcagtattcttgattatacacgtaactttatgtatttctttgccattcattgataaatcgttcccacatcccaatataaatattttcaaccatggttttaataatattttggtgtttgagattagtatattccttcaacaaatattaatttgagtgcctcctttgtgccaacagttttccaggtgctgggaatataagtgtgatgtgatttgtttcaaataatacagtatcattatttctaacaatttattttgaaaaattagagtggcttgagttattactattttcatgcgtgtccatgtgaagagaccaccaaacaggctttgtgtgagcagtaaagctgtttatttcacctgggtgcaggcgggctgagtctgaaaagagagtcagagaagggagatggggtggggccgttgtataagatttgggtaggtaaaggaaaaaggggggttgttctctggtgggcaggagtgggggtcacaaggtrcccagtkggggagcttttgagccaggatgagccaggagaaggaatttcacaagacaatgtcatcagttaaggcaggaacaggccattttcacttctttcrttgtggaatgtcatcagttaaggcaggaaccggccatctggatgtgtacgtgcaggtcacagaggatatgatggcttagcttgggctcagaggcctgacacctataacatttttattatatcttactgtgctccaatatcctttcattagcgggagagaaattggtggagtagatgttattgcctcagaaattaaatgtaaccacattctatctcatgcaacaaaaawtatttttggttgttttctgagtaacagtgtgcctgtataagtgggtatatatgtgaacactatatttcacagtgaagaaactcttgagaactactatttcacaatttttttaaatatttgctaataaaatacagaaacactgaaattctagagtttgcttagaatattgcaaagtaaggaaatttaaaatattctcaaagagttcctcaaggaaaggtatgtgtgtatgtccctgatggttccaggctgacttttatcacacagactccatcactgggggaatcttccctcttgatctacaatgcaagtggaattctgatttcagactaatctctagcaatgagctagacattttttttttgtctctacaaaaaarattttgatttgaacagcagttgtttgtgaggccttagcaatacaagaaaaccattcattagcctatgaagagaagcgttgaagccagtgtaatttaagaattgactatttaagatgctattgaggaaagattggccagttttgtctcygttttttatgattgagactgtaattgttctcgttgctcttaccttaaaaaacttgctgaaaaaaactcagtaaagaccaaaggtgatcagaatgaaaggaaaacatawataaagacatttctttgtctttaaatctaggtatgtaaaggtagattgaaactttggaaatgggatggtcaggccggagctagagagcttggtttgcaatcttgtcagcaaaacaacattttaggtcaacgattatgcctctgtagtatctagtattatatccttctattactttgaccatttcgattttgtaatttactctgggaaaaagcatgggaattcttgtattttggtagaattgttagttttccagaatggttttgttttccttcaaataaatgttttcaaaagaattaacgtatttataagaggctttttattatatttccaagcccccctttgttacttgcaagaccagcagaaatatctagctttttcatagaagtcaatggagaaaaaccaggaatatttaacagaattttactttgctttctatattgctaaaacatatctattttgttaaggtctatttgaagtagcagtgaaactgctcaaaagcttacttggactagtttaagagtccaagaagggcatggctttatttatacctgcactttatttcttctttccgaatttactctcctgggatgtgaagcatttctctcaaccttccaatttggggagaatttgcaccaaaaattctgggaggccaagaggtacggaagtagaggaccacatcatatgtcccctcctgcctcaaagagaagcatcaggttgaagtttaggggaaattctcatgattctttctctcatactctactggattttatgctcaattaaattaatcccattgaataggaaaattagttccagcttgtactctcacgtctacatctaagttattgaggaaccatgggcaagtcatttgacgtgtcgggggraggggagggtggttatctgccagagatatattaacgtgtgctctgcctaactcccagggtgtttargcctaaacgagtcaacmggtgcgtgttttkgaaagctcactactccccatcctcttcctatatatccatatatatccaataaaatctgactattgttttctaaagtatattgattggaagagttgttatcgaatccagtaatcttgaattggaatgattgagttaatggccatcagcaaagtgtgtatctaaactggcttgtgttttttttcagattcaaactcagatgactttgaccctgcttccaccaagagcaagtatgactctctggattttgatagtttactgaaagaagctcagagaagcttgygcaggtaacatgttccctagctgaggatgacagagggatggcgaatacctcatgggacagcgcgtccttccctaaagactattgcaagtcatacttaggaatttctcctactttacactctctgtacaaaaacaaaacaaaacaacaacaatacaacaagaacaacaacaacaataacaacaatggtttacatgaacacagctgctgaagaggcaagagacagaatgatatccagtaagcacatgtttattcatgggtgtcagctttgcttttcctggagtctcttggtgatggagtgtgcgtgtgtgcatgtatgtgtgtgtgtatgtatgtgtgtggtgtgtgtgcttggtttaggggaagtatgtgtgggtacatgtgaggactgggggcacctgaccagaatgcgcaagggcaaaccatttcaaatggcagcagttccatgaagacacrcttaaaacctagaacttcaaaatgttcgtattctattcaaaaggaaawatatatatatatatatatatatatataaattaaaaaggaaagaaaactaacaaccaaccaaccaaccaaccaaccacaaaccaccctaaaatgacagccgctgatgtctgggcatcagcctttgtactctgtttttttaagaaagtgcagaatcaacttgaagcaagctttctctcataacgtaatgattatatgacaatcctgaagaaaccacaggttccatagaactaatatcctgtctctctctctctctctctctctctyttttttttttctttttccttttgccatggaatctgggtgggagaggatactgcgggcaccagaatgctaaagtttcctaacattttgaagtttctgtagttcatccttaatcctgacacccatgtaaatgtccaaaatgttgatcttccactgcaaatttcaaaagccttgtcaatggtcaagcgtgcagcttgttcagcggttctttctgaggagcggacaccgggttacattactaatgagagttgggtagaactctctgagatgtgttcagatagtgtaattgctacattctctgatgtagttaagtatttacagatgttaaatggagtatttttattttatgtatatactatacaacaatgttcttttttgttacagctatgcactgtaaatgcagccttcttttcaaaactgctaaatttttcttaatcaagaatattcaaatgtaattatgaggtgaaacaattattgtacactaacatatttagaagctgaacttactgcttatatatatttgattgtaaaaacaaaaagacagtgtgtgtgtctgttgagtgcaacaagagcaaaatgatgctttccgcacatccatcccttaggtgagcttcaatctaagcatcttgtcaagaaatatcctagtcccctaaaggtattaaccacttctgcgatatttttccacattttcttgtcgcttgtttttctttgaagttttatacactggatttgttaggggaatgaaattttctcatctaaaatttttctagaagatatcatgattttatgtaaagtctctcaatgggtaaccattaagaaatgtttttattttctctatcaacagtagttttgaaactagaagtcaaaaatctttttaaaatgctgttttgttttaatttttgtgattttaatttgatacaaaatgctgaggtaataattatagtatgatttttacaataattaatgtgtgtctgaagactatctttgaagccagtatttctttcccttggcagagtatgacgatggtatttatctgtattttttacagttatgcatcctgtataaatactgatatttcattcctttgtttactaaagagacatatttatcagttgcagatagcctatttattataaattatgagatgatgaaaataataaagccagtggaaattttctacctaggatgcatgacaattgtcaggttggagtgtaagtgcttcatttgggaaattcagcttttgcagaagcagtgtttctacttgcactagcatggcctctgacgtgaccatggtgttgttcttgatgacattgcttctgctaaatttaataaaaacttcagaaaaacctccattttgatcatcaggatttcatctgagtgtggagtccctggaatggaattcagtaacatttggagtgtgtattcaagtttctaaattgagattcgattactgtttggctgacatgacttttctggaagacatgatacacctactactcaattgttcttttcctttctctcgcccaacacgatcttgtaagatggatttcacccccaggccartgcagctaattttgatagctgcattcatttatcaccagcatattgtgttctgartgaatccactgtttgtcctgtcggatgcttgcttgattttttggcttcttatttctaagtagatagaaagcaataaaaatactatgaaatgaaagaacttsttcacaggttctgcgttacaacagtaacacatctttaatccgcctaattcttgttgttctgtaggttaaatgcaggtattttaactgtgtgaacgccaaactaaagtttacagtctttctttctgaattttgagtatcttctgttgtagaataataataaaaagactattaagagcaataaattatttttaagaaatcgagatttagtaaatcctattatgtgttcaaggaccacatgtgttctctattttgcctttaaatttttgtgaaccaattttaaatacattctcctttttgccctggattgttgacatgagtggaatacttggtttcttttcttacttatcaaaagacagcactacagatatcatattgaggattaatttatcccccctacccccagcctgacaaatattgttaccatgaagatagttttcctcaatggacttcaaattgcatctagaattagtggagcttttgtatcttctgcagacactgtgggtagcccatcaaaatgtaagctgtgctcctctcatttttatttttatttttttgggagagaatatttcaaatgaacacgtgcaccccatcatcactggaggcaaatttcagcatagatctgtaggatttttagaagaccgtgggccattgccttcatgccgtggtaagtaccacatctacaattttggtaaccgaactggtgctttagtratgtggatttttttcttttttaaaagagatgtagcagaataattcttccagtgcaacaaaatcaattttttgctaaacgactccgagaacaacagttgggctgtcaacattcaaagcagcagagagggaactttgcactattggggtatgatgtttgggtcagttgataaaaggaaaccttttcatgcctttagatgtgagyttccagtaggtaatgattatgtgtcctttcttgatggctgtaatgagaacttcaatcactgtagtctaagacctgatctatagatgacctagaatagccatgtactataatgtgatgattctaaatttgtacctatgtgacagacattttcaataatgtgaactgctgatttgatggagctactttaagatttgtaggtgaaagtgtaatactgttggttgaactatgctgaagagggaaagtgagcgattagttgagcccttgccgggccttttttccacctgccaattctacatgtattgttgtggttttattcattgtatgaaaattcctgtgattttttttaaatgtgcagtacacatcagcctcactgagctaataaagggaaacgaatgtttcaaatctacttctgcttttcttatttatcgtaaccaaactcctggcatgtttctcagatcagtacccattactcgcttattattattctatttcctctctggctctctttccctttctccttgcttttccatattcatggatgcatttcagctctaaggtaacgtgcatcttctgtatcttgtctttttctaaacggcaaaggcagacgtggtggtttctataacgaacgttcagaggtgaaaaatgacaggggattgtatcaaatggattagctctatttttgtacttaaccctgggaagtgtgtatttttaagtagaagctctttcccctagggaaaaaactcactgaatattcagtatagaaagcgattttgttgtagatggactgaatatttctccaagacttgtaacaggatgcagttccccatcatatggaagtcatcgggttggttaaatatgggatgagctgatagctgaagacacatcgtgctgtcaggatgtccactgtggctggtagatgatgacggtcctaatgacagagaatgcccttgcccaatttcaaatggttgctcccattgccaatcatttgcattgcaagactcaacatatgcaacattggggaaagatggctaaattatattccatcatttccatctcctagagagaaaaagagtgtttgtaaatattggaaatgtgataagagctatcagaagtgcattgaaatctgctaaataacataagatacactccccatggattgttttataccaatataaaattcatcaattatttattttatggaaatggaaaataaaaatctaccattatcttatcttacccaaatactgaatttatctgccactgtggataccaagcactcctragtttcaatagataagtaagtctcagttcctgacttgtcttctattgttgcttaaattgcataaggcatttttaatcttccggttggaaccagcaaggacattagaactcttccctaaatgcttaactttttaacctaacaagtcttttgagggcggagagaaaatgagggattttcagaagcagcattagtagctgctagtttggtactggaatatcctgattgagataaaggatttatttcatattgtcctcaaaacattgactcactttcattcttgttgatactaatggcaaaataattattaaaaccaaaattgggctgacaaaaaaataacatttgatatagctttttttaaaaaaagattgtctcaattcaaaagtcctccaaaccaaatctgtctaaactgtatacaatatgatattgaattgaaattcttttttagcattgtcggttttctcttctttgtaggtttatttagctaatcattggatataatttacagccctaataacgttactatactgactcgactgtagtgttactagctacacatttataactcagtattagttatagaatattttaactaaaacattccatttgcaatatttatattaatcttatattttgcaattttcgttgctactccgttttcaaacacactacaatccattataaatcaatctttgtactttatcaaacggcagagagtaataaagaaggtcacaactcatagaggagttccttggaggtttgtaacatcatgatttaaatctcagaaagatttaatcaaaagctgaattaatccctgggggaaaagatagtatatagattctattgatggacacaaagcagcctatttctgttcaccggtctctgttagcatgttggggaaaagaaatacagattttctgtgagagggaaaataagattttcttgtaggggaaggatggtaagacataaccttcacgttatgcttcctcccttccactcaaaatggcccatttttattttccacttactggggcgttatctgttctcctagtgcatggagaatgttaaatgtcctccacccccatgtttcccttgttatattccatgtgattccagtaactatgcagagtcccaaaagctccactctagtcaagcatgtggaatgcggggtcacatgggctggtttccaggtctcttctgtcgtaatcaggtgactgcccttgggcgaattctcagcactggggacactggaaacttgtagaagaaatgattatgaaatgtgaatattttgaggaccaggttcgactgaaaagccataacattgtttcatgactaggatgtaggctaaaggcaagaggccaccactttcccacatgtctcttttctgtccataattaattccagaggaatgtgaccatattctgttcagctcaaaacccattacttaccattaggtgacttataaaggggcagagtgaaattaattaattgaaaagagtaagagaacttttagaggagaaaaccaaatgatcctataatattttcatgattaaattaaatgaatgtaattatacatgcacatatgcacaccaaggcattattataatcaaggaccttaaaatattgtatcatttcaaatttatgcatatagcacttactgaaggcaagtagctagtgtgatacttgaatttgcatattgaccattttcatatattttcatatattaatttatagtaggaagaagctgaattattaggaaaaatcctgggatgatttaaaaaaaatattgtgcttctacttgtttttgaacatcaggggcacttagcaacattatctttttttttccacatagttttctgtgatggattttcaacaagatgacatccaagtgaaagccaaaattaaatgggaaggaaagaatgttaagtggtaaaatcctaaatagcttattagactacttaattggagggaatttattttttgctgctgttaggaactctatagtcaagcttctctttaacaatactaattgatgaaaaaaagtggctatagtattatagttaccacaaaatgccctccagcaagtyatttaaggaaattcacaggtactttcctttgatggacgttggtgttgctgaaaatcaagtcctgtcttcattcgtatcatcattgctttctcacttcatttccaagcaggtcccctgcttattcctctcatagcttcacagtgcgcttgaaagactgacttaattcttaaaagaaaattaggacgtgcttgttcttagtttaaccatctactaggttttcggcttgatcactataccctttaatcagatgtatgactaatgtttcatagtgcttagaagtattgccctctgtaagcacttccctatttgttggcaggaatgtgtatacactatcacagaatgatgattaattactctgcttcctagagaagggtaagttagtaaactggtcacacggcatgtgatggagccgtgttactttcatgtcaggcaatttaatgatcaagtgcaatgcatggcgtcattctcctccacttatctgtttacatgggaaaagcatcctggtactgattcaatgagctgccttttccagggtcaacagtctgaattgcagttccractatccaacaggaaaacaattgaacagaaagcaaagattggagttcaccatccactgtttggcttcagtatttggagggtgggaagtacctatctgttgggctgactttttgccatttccagtggcaggggtggcggcattaaagggagtgccaatgtgtgcacctgatgaatgaaataattcatagacaactcataagagtttctttgtcacttggtgccagagtctcattgagccactgtgtgccatggcatgccatggcaaaaactaagaccaaaaaggtcacctgaaggaaagagaaggaatcaatagaaggttaaccaaacacatttgaacttcaggcacgaagcaaggtttggacagaggtttcccgtggtttcttatttgccttgtatgccaactcattccatgagattatatagacaaaakaggcaattgtgcagctagsctgtagaattgtgaagaaaggaatgaacctcacatattggttctatatgtgagggtagttctgtgtcacatagacagccgctggcctttgattaaaatcctgtgtacttcctggctaccacgttaatgggagacccttgaggatttctccacagctaggtttttggatagaacttttaagctttaattttgtggaatgataaaaarataatccctacattcatagaatacaaagagctctttagatttcaataatgcattgaggaggcccccctattttcttctcattgtttgtttcagttctaccatctcaaagtagccatttccagcaaggaaccttcaccaactttcagcattctgaaggttaaactcaagccccctcaaaagtcgtatctgctatatttcatggagacataacttcatggcattgcaataatttaaagacgttatttgcttgtttttgctgtcttaaaaacttagctttatcagctccttttagaaacttgatcaacttggagactccctttcctagaatcagcgcttagtgacacacctggtcatcctgtatcccagccattggacctcaggtaatgatgttgctcaataagacctcttaacatcctcattttaaaattagagaaatcttcctgtactggtaagaaagcaaatatgaaaagctgccctccatttgaaagtccagtgaattcaggatgtgattaaaacagtgaagataatgacaaagatgatgatggtattagctaacatttattgtggatttatcttttagtcattttacttagctgtttacatgaattttcttcattaatcctcctaaacaaactgtaaggtaggtatacaactcttcccattttattgaggaggraatggagggttaaggtagctggaaaactgcccagatttgggcaaagtccagttggtcctaaaacttatttttgaaagtctcgtcctatatataatgcctccaggaataaaatattaatcttcaaaagaaatctgttagaggtatttaattgttaaaatttgtgtacttttgttgctaccgtctgactgaaaccaaaatctgcttgtattgcattcatcattctatattgatggaacttctccaacgtactagaaactccacatctagttggcagtayagtaagaaaaaattaaaaaatatattttgtaatagcttcggtaggacactctcaccagaatccttattgtgagtatctatatatctatgtatctgtgtatctatctatcttctatcatctatctatctatcatctatttatccatctgtttatctgtctatccacctacctacatatattgcrttttgtggaaagtatattgctgtaagaccaatgtctatgagggttgaggccagagatcctcatacttaatgggcaggaatgacctagtgctgtgattccaaggtgtacgatcttacttacaagggctgataaccaactttacaaagaggtagaaacctcttccataagttaaagtggatttggaggtataaaatggtatattcttaccactgagaagttaaatcacaaaaataatcaaattgaagagctttttatggtttttcaagcactattaaaaagtttctgggctgggcgcagcagctcacacttgtaatcccagcactttgggctgaggcgggcagatcacttgaggtcaggagttcgagaccggcctggccaacatggtgaaaccccaactctactaaaaacatawgaaaattagctaggcgtggtggtgtgcacctgtaatcccagctacttgggaggttgaggcaggagaatcacttgaacctgggaggtggaggttgccgtgagcggagattgtgccactgcactccagcctgggtgacagcgcgagactccatctcaaataaataagtaaataaataagttttcaatttagggctaatataagaaaaaaacttaaaaaataatcagtcccgattttgcagccattggtaaaccagtcattttctcagaaaattcgtctgt

SEQ ID NO: 1611 - DNA, 19294 bp, Homo sapiens
agttgatacgatctgtaggtttaggtgtttttgttttgctgtttccttgtatgttaacaagaagaagagaggaaggtgctacctttgtgtttgtgctttaggagctctggcagctggcccccggcaggatgtgatggaacatagctcacaggatcagagacaatcgattcagttcagcagagagtgatttatagcaaggagtttytaaacaagcttagacttcaccgcaaactggtgggatggtctgaattttcattgttggtggagctcattagagggaagaaagaggaaggagcagttgtggcagctgtcaggaaacctgagcaaatggcagagtatggcgcaggctcttggagtagaccccagaamcagaaaacaactccgtttgctgatatyaggtccaaaccaggaagggcctggtccccagtgaccaagggtccagtcagagcctcctggtatgtaatcatggacagcttccaggatctgcttccaggattcatcacactggtcaactgttccagccaggagtagactctagatattagtaggtgggagacagatttgataatatacctgtgactgcacaagatttgggaagatggagccacatgcagcttttattagttgtggcaaagaggtcaccctgtacccatggagaaaagaactccctatctctacagatagggaatctgacagaatagaaatgaccaggctgctggctgccactcctgaagtcaattctgaagatgcatggaggtgagagggaggatgttgaagccagagttactggaaaaactaagaggaacacttggagagccagaaggtggttggatcatgatgtttgtgtaaaagtgctggccccgaatggaagttggcctctagaggagggtctgggttgggagcacgagtttatttctacccctttggtcttgtgcattgccagattgccactgaatggctgctaaagagcacgtggtgaggcagaaacttctgctccatgagagactgataaggaaatgctcaagctgtctggccagctgcatgcattgccttccccagcacccctccacacacaaccttcgacgaagtccctagggacagggtcacccatttggggaatggggcaatgccctacatgaagtgattaagcccagagagtagcacctgagcatctcagccttgaaatggccctctaggaaggggaccgatggaggccctggcttctagccctcactccagagatacttaatcaatcaaggagatgaatgccctcaggagaacaggagctctgagggaaaaacactgagactgccaaggagaataaagagaaagactcctggtggaaagctatcygagatgcaacatagttgatgggccaggaagattaaaataagcatatcaaatattataaaagagttgagggaagatagacatgaaacagcaataagaagttatgaagaaccaattggagatactaagtagaaaaatatatgcattggaacaaatatcataaatggatcgaatgacagattgaacatagacaaaaaatgaattagcaagtaggaagattgggatgcagagctagctctaaaggattctggaggggatataaggagagggtatttgtaaaaggaaactaagcattgtggaggacaatatctgcattgatatagaaggaatcccaaaagaaaagaagagaatacttgggatgacatttttgaaggaacagtaacagagaacttcccagaattaaggaagcacatagaaacctcagattcagaaggttctgagctgtatgagatgcgtcttgggtcccacatcrtatccacacaggagcccaccttttactccagccatcgcaactccctgcaaggacatcttgacagcccacatccactaagctgccctcagcacctcttgtgctctgcccctaggccactctgatacccccgcatgaaggcatccagaaccctactcagcaaacaagcatgcacagctggaagtgctggtgacatcccacagggcagcccttgcccaatgtggggtcagggactgagggatcaatgcacctttctttcatctgttggttggacatttctgaaggacaatgtacagatgtcctggagggatcacaacaggaacaggcctagtcatccacctggagaacttttttttttttttttttttttttggtaacagctttcactcctgctttcttatctcctcgtcctccattcctgtctcctgggatcagtgcttgacaagtggaactgctaaaccaacatcagcaactctctaaggccagacttcttgttatagtaaaaaatagacccctattaatgtaagccmctgcaaattgggctgccaattattcacaggtaaacataattctggctaatatgtatsttgacccgagccacagcgtctgaataaaggaagtttgagtcctgctgctgaaattcaggacaactccagatcacccaattttatggagaggtaatgctcttaaggccttggagataattctactcagctcagcaggatacaggaaggaagcggggtgtgtgtgtgttgaaacatgaactggaagaaactctgggtgcctcagggggatgtccccttctttgtggaaaactgcaatgattccagtgagacaaaacttggtaaggcaaaaaaaaaaaaaaaatagttatagctttccgccttcctcatcttctattatcctatgcctgtttcactgatctgagtggtagtagaaaaaaaatgacagatactaaaaaatgccagagtgattcatagaagttagggtatagaaaaatccaaacaaatgaaaaaccaaaatagcagcagcaacaacaacagcagcagcaataacaacaaacagcyctggatatcagagatggattaagagaaaagacagtttgtggggaggaagaagagaaatatctaatgaggctttctaaagaggtcttgatacatgttacatgatgtagtaattcctcttctagcygcttcaagaaacttcaatgaaygcttacattatgtattgcaagaattttggatatggattcatgtttctttgggaagtgatgtcatactgatgtaggtcatgaagtctcagtctcatgaagaccaacactataatatgtcctgaaaattttatcatttaaaaggagactaaaaccgtcttgagatgcaaatggggggctcattggatgagctcattggcagggcttgctatgagcaggcttcagattcatgcctctgagaaacggcagaccactttagttataaagcatggagttactcacaggaatgggctcctatttatctgctcaagcatctctctttctgcaccacatatttataggttgccagcgctgctcccaatgcgaccctgctctacagccacagcgattgtttaactaaacaggtggaccaaccaaggtctcttctttggaattgtaaaaacgggacctactgaacaagagccagctcttwaagtggtgggacctawaaaatgcaaacttgtgagcagctggtagccatatttccagccccttggactgcaggaacagagtaagattggcagcaaagacagggaggcagagggcagaatcccaacagtgtagagtgccttgttaccatttgtttctgaggcctggtttctgaaccctgtctttcatttctcttaccctaataatactcttttatttttgcttatgctagctcaggtggattttcttttccttgcagccaattttttttttttccagaaaacactcacaaataattagcattatagaggaacagaataacagcatgacagcctcaactacttggctatcaaattaccttagttctgtggtctccaacaaattacttcaactttctctttcctcaattgttaaatggagatcaagtttgttgaaataatcaaaagtgccaataacacaggtaaagcactcagaacagtgtctggctctcaataaatattatctgttataagtattatggatatataactatcaaagcctggaatacaagggtccgctgtagttgattattcaattcttacagaaaaaaagctcacaccgagtgccaaaattacaygagtcgacaaaattacatgagtcagaacagtaatcaaycagttacacctccggtcactgtgtgttttgtacttcccagttccctctgtcattgtttgttttttaataaactacattaagtgtggtgggaatgaaaggggagacaggcagatgctccaaagaatatgagggagggaatctgctttcattatcattctaaatttatttccgcagatatgacttatcatctgcactgtctcttcttcctttcactccctcctttgtaccattcatatcataccttttctcaacttccttgcaagcacctatatataatgttcccctgtcaactcccatccccatctcccagcccccgtgccttttgtatcttaggttcttagcataggttagtgaaacacatacaaaatatgattttacctttctccctcatcttaaagaaaaatggcyggcctatcttgcatcttgtttacatcttaaattttggaactcaatgttatgagcaagagaaaatctcagcttgtgcctcaagatggctcctctgatctcaggaaggcctaggggccatgtgggttttgctggccctcagtgtattcatgggtgttcccaccccaggctctgaagatgatggcagtagggattcaaaggggacactagactgctggggtgttcagccaccaagctcttgtctttttcgagaacatgtagtttatatgaggaaactgactctgagaaagcttgatcttttttttttttttttttttgagacggagtctcgctctgtcccccaggctggagtgcagtgggctcactgcaagctccgcctcccaggttcaagccattctcctgcctcagcctcccgagtagctgggattacaggtgaccgttaccatgcccagctaattttttgtatttttagtagagacggggtttcaccgtgttagccaggatggtctcgatctcctgacctcgtgatccaccctcctcggcctcccaaagtgctgggattacaggcctgagccaccacgcctggccaggaagcttaatcttaagtgaagggcactgcttcaactccagctgacgcggggcaagtagggcatagctgagctgttgtcctgggtggcgagggtctgaaagcagcagccaccactggcactaaaataaattacaggcacaaagaggaaagtaacaacaacaacaacaataaagtgtccaaaaatcacacgtaaggatgctcaacttccctgataatcaaagagacacaaactaaaacaaccataagtttctgtttttgcctcccatactagtaaagattaaaacaacttctaattcactttacaggcaaggacacagagaaagaggactacttataggaatataagttaatacaagccttacagaaggtactttagcaatgattgtagaaatttaaaatatagatgccctttaatgaaaaaaagagatttctagaaatttgccctaaaaaaaaattgggcaaactcttaaaaaaaaggataaaaatctatattgacattggcgtagcccaagtctgcaaaccaaaatacaarcagtgaattcttctggtggcaagaattccttcaatatataatatcttttacactacttacaaatttttgtgagaagaaaaccattttatgtctatttatttttggggrctactggtagaggtgatagcatgggtggtagcagctacagagactgggtagaacaaacatgctagccgctggtccgcagatgcaccaagcccagtgtgtccagacagctctgcagagcccacgttcagtccaggctcccctgcccagtctgtgagtcattccctggatcctgctgaccaacattgatcacagtcctcacatttccttgcttcaacatgggcctgtcttctaatgtcttatgtgctggtcccaaacagccagctgtatggcagtcattggtgggggcatttttttcatgcttaattctttgagatttttggatcactcattggagactagatactcagtagctggacatgaacataacagcagtttttggaggcttttgactttatttagaatcacctagaaaacttttcacaaatacagaagttctatccctagagattctatctagttggtccagggtggggtctaggcatcggtattttttttttaatcccccaaatgaatttaatgggcagccaggcttgagaaccactgctccagggsctgaaaacataggatccaagtcagagcaccaggagattgattaattggttagaatgacttgaagtgaccaccagaaacatcacatttggagctcagttaattacccccttgatcacactctgcaccagaggggcagtttatatttgatattccaaagaaggtatcagagtacaaagacttcgacaaacacaaaacaaaaaagcaaacttgctttgtggcgtttttcctttctccagttaaccaaagtggtagctggaagatcaaatatcctttgaccaatgtaatagtatatcttaactcgcagaaacaatagagctttacagaaaactstatcagttgagaactttgtttcttaccctctatttaacacactgaataggactgagtctgccaggcattctctcagaagctcattaggtctgtgtcrgaattttggatgagtcaccaccagtggcattgttaggtagcgagcatttccccagtgggatcctttccagtcactgacagcaggaattctcagagacatgcactttatgtaactttcttgctattaaatcccatgcactattaatattcatattgcaacataacaaacttaagctttatagacatatgctctttgtgtcttccaaattctctgtatgccttaatcaagcgttgttagtctggtaatgtaactatgctctatttgttatgtctagagatgttcaaattcagkcactgttatatcatttttgcagattgtttggccgattgttaaactggccatgttacgtgttccatgtatgagattttatgagatttttctgggtgttgtgtgtttcatagataaattgagacatttcctttggttaggtacatttctttcttaaagcagaactgagaaacataaagataatggatatctggtttactcttggcccctatagctgtccttgatccagaggaaaatttggcttgtaatgaatttcaagtgtctttttgtccttcttggtttgtataacactactgatgttactgtctaacctctcagcttctacagaatttgtcaggcctgtttattttctttcccttcttgkttctcactgcagctctcatgaattactttcctaagggagagttttcagagttattttcaattactacacgagaagaagcctaataatgtagaatmgttttttccagattatgtttcacgattaataccatgagatatttctggatataaaagggatttatactcaagtatgtttgggaaatgctgcagactatctttctacttggagattgatgaagcacatttgtgtatatccattcactgagatgtctgcaattttttaaaaagaactgtttaatttttgtttcatccaaaattttccaaaccacttttactatggaacctttttgcatcctgtgaaccttttgggaaatatggaaagaatacacgagttcaaattttaccagctgtgtaacattgggcacaacgcttaatttttttgaaccttacttgcctcatttttaacgaagagaatgacacctatccctaccaccttgcaaaaatgcattgtagcctgagggctactatgaaaataacaagaaacatccccaacaaaacataatgaacacatttaagcagctgtgcctaacatagaacaagctgtacttttctgaattttgaaaaataggtctttcytgaagttattaaatggtaataaaatgtcattgataaaattatacattcataattaactggacacattttcatctgtataacatttgattactcttctgcaagtctactaaggagcatatcaacagtcttaaagtactttatgatataaagtttacaatataaagatttttagatgaasaaaaaactgctgtatgttttctcagaaaaataaatcctgagatacttttaattataacttagatcaagaatatttaagtggtctattaaaatgttgataaacactggaagttttgatggcaatgggttgcttaggatctttaaaaaattctccattgccagtccttaaattagagataaatatgtatttgatagaaacaatttmtatttagagtggttaatccatgactggggtatcactgcatagttttaatacattcagggccaggtatgatggctcacattataatcccagcactttgggaggccaaggtgggaggctcgcttgagctcaggggtttaagaccatactgggcaacaaagcaagaccttttctctgcaattttttttttttaattagctgggcatggtggtgcctgctgcagtcccacctactcaggaggctgaggtgggaggattgcttgagcctgggaggtcgaggctgcagtgagccatgatcatgccactgcactccagcctgagtgacagagtgagaccttgtctttttctctctgtatatattcaagttggtatgtttctttccaaagccgccctccaggaaccatgtttttctgcagttctgtggatactaacagtcccttacttttaaggtaatttatattttagttttccttataacatctgaaatggctaaaatggagtctggaaatgagtagagcaaagccaaacttatcatacgctgagcaacagagctagagttcagcctgctgaacacgggcaaatcccactgtgccttcatacctggcaatatttctgcatggcttcatctaattaatggaactttgctcagagttcacgtatgsagtcttttgtattccctgcttctctgggttccctagatctgaacacatttctcttttggcagttgtcacactgggtgatatttgttgatttacctgttaaccatatccctgtactcgaagtcctggaattcagagtctatgtctcaatcagtgtttgtttctagtgtttaacccttagtaggcattcaacaaatggtggaatggctgggtgaataagtggtctccaaagtgcctgcctggcgagtacataactctcttttgacagatatctgtccatttcmaaatctcaccctgaagggtttttgacgcttagttgccatgctttggaccttgtgaccctgcactcttgccctgactggccagaccaactgtctgactcaaacattaatatmtgcagactcaccggagtcacaagagtgctctatgctggatggtggttgcccggccccattatcccctcctgtcttggttagattgagtggttagaaagtagagaggctctggaagttggcccttagaaggcagaagttatgccatgaaacaccaaatagagggaaggtagataagaggtaggaggaaatactgaagggatagaaaagtagagatgaggggtcatgagctcattaataaactcgtgcttttggatctcgaagagctacccttggcccctggagcccctgaaatattcttttccagcaaggaatgaattcccatttctccaaatcaagctgtgcaattgctgagattttgctttctttgatatctcctgtgtccttgcattcaacttctgttatttaagctaacctgggcatgttagattatcagacaacttatttttattcttttttttaatacagatcaggaagcggagggttggatctattcagagagaggaatggagtttgatttggctttgtgcatgtgaattttctctagagtaagcccaaagtcctaaggcaggtttgtcaatgtggtcctgaatcaggattgtgtgtggctggtggtgacggtggtagtggtggagggtggttctctctaacaggctattcatggcattctacgcattgaagtttatgaatcattgctttctgatgacatacaaattgagctaatgccttgaggtcttctggaccaaaggtgaccaaaatgaccataatgagtcttattcacctgggggccatttgtgcacaagctgttctctaaaacaaggcattcagtctcccgggatgtgagagatgcctctttccctctatgtgcaatctaatgtgcctatagatagatttttttactgaattaacaaatttcttaaaaagctaggaattttggacctatgttacaactagctaagatttttttttttttaaagaagagcctaaggcaaatccaaacttgcagaagaaaaaacactgagacacaaggaaatagcaataaatcattgatttcttaatatccttgcatcatttagaatattatgctaaagacagctcactggcaagcctggacgttcccctctctccccaggcaaagttgacattgcaccatagatatcacagccgtctttaggagttacctttttctttttaaggaagacactcttgcaagtattctagagtactcccatcattctctcctgagatgactagaagtcttttagtctcttgtgccctgttggtaactgcttgcagtctagactttctttgcatcctctctttaatcatgatgctgccccccaatataaaactattctgatttttgaacaaaatatactaaaatggttctgattactcaatcatcattatatttaattatgttaaggcattatttaagaaatcctgagaaattctgggttcatgtttttcctaaagttctggtcacagattgtgattaaaatagaggaataaaaaacaagacctcacctaaaagctaaaaatggtatatatgatttgcaagcaggggttctcaaatattttcatttatttattgctttaaaaagatgagtttaaagagggaaagtaatttaagcatgagaagtcatagaaattgatttgagcagcagctataattttttattatgaaagtaaaacattttgcttaaaagggggagaggaatagagtaaaaatagacaaatttttataagtagaagtcctctgtccttttagtctaatccccaaaaatagccactaggaatggtagaacatgtaactgttgaaaaatctgtataaatataatatgtaaactaaattgtggccaaactattaatacacacacaygcacaccgtttatatatgtatacacacacaaacacagtttatatagtgtatatgtatatrtgtgtgtatacacatgtatgtatatatrtgtgtgyatacacatgyatgtatatatgtgtgtgtatacacatgtatgtatatatgtgtgtatacacatgtatrtatrtrtgtgtayacacatgtatgtatataygtgtgtgtatacacatgtatgtatrtatgtgtgtgtatacaatacacacatatttgaaaaagtctaaaacagtgcatgtgtatatatatgtgtgtgtgtgtgatatacacacacatgcactgttttaaactactttttcaaattgaaatacaacttggataaatttcatggttacatacatagaaagatttaacttattctttttattttattttaaaaatttctatagacacaggttctggctatgttgcccagtcaggagtgcaatggctattcactgatgcagtcacagtgtactacaaccttgaactcatggcctcaaatgatcctcctgcctcagcctccagtagctaggactacaggtgtgtgtcaccatgcctggctaacttgctctttttaataactacatagcatattatattgttgatatccattattacttgcactattctcccacttacggcatttccattttttcatctgttacaaacaatgcttcattgaatatttttgtacaaaatgttttgtttgtctgtgacagtctatctgtaacagtgaattagtagaagtggaagtgttggatccaaggatgtttaattctaaattttggtacatgctgccaacttgtccttcaaatagatgattagaattttgactttcaccttaagggtgtactgaggaatatttatagtaagccaatttattgtgaacctcaaatcttacttgtatggtcttcttccaaggccctgcatgagcccttaaaatatgtagacatttctaatgtttttgtaaaattagcaaaagtaagacatttcaaccacaattggttatgactaccatctcttaactctgaattcttcactgttacaccccttacttgccacatggagttggagtggctattcgctattttggggatcaggcttggagaagttgagttgggatatgttattttaacagaattttataaagaccttttagaaagtttcaatataataaggaattacagacccttgatgttgacatataggaagaatatgtttttggtcatctttaaaattatttattaaagaaataaaattcagattaaaagtcagtgaaatatgaaaccaaggcaataaaaatgtgtggtgggatctatggaattattttgatatacagaagtgaattgtgattttgctgttgctgtatgctggtgttggaggaccctccctgctttggatttaccaacagtgtgaatcaagaaagttagccaaacttcaggctcaggtccagataggaggcaagggtacagcttgcaaaacaaaggtggaacctagagagttacagcagatgacagaaagcttcagagttccgtaactaaactggctgtgaataatatagctggtattaaagaggtgaacatgattgaagatgggacagtttttcatttcaacgatcccaaagtctaacctctgtctgccccctctctgttaacatctttgsaattacctctctctgctcctctctctagttcttctctctctgctaacacctttgcagttaccagtcatgcagaagccaaaccaatcacagaaatgtttcctggaatattaagtcagcttggtgctgacagcttaacaagtctcaggaagttagccaaacagttcccatggcaagtcttgaatagcaaagcaccaaacccagaagacaatgatgaggaggaggatgtttcagatcttgtagaatattttggtgaggcatcaaagaatgaagctaactaaatttttttctggtgtttggaggctggcatggactagatttaacaaataagccagtggttccaaagttttacagatacagggtgtattgcctattgctattcaataatataaatattatacatatttttaaaaaagaagtgcattgttaaaaaaattcactctgaaaagcagtaatttattaaaaggatatacattttttcttataggggtagtaaataggctcttggattatttgataatcatgtttataaagaagagcaaatcatataaatacatgaaaatgatgaagttcttattgatttgacagaaatattggcatggacaataatgtaaagctcataacacaccactgtgacaagcacatcaactacaaagaagtgccatcaattgaaatggtctttaacattgatatggttacatagcaaccaacttgaaattccctgaaatattacagatcatatatgaaataaatgttttagagtttttttcaaatttatcagctatcctaaaaatttataagatatttccaataagttgtgaaactaaaagaaactttttcaaatatcaaaaataaaaaattttcttttgaccaaccatgctggaggaaaaatgacttatatttctattctctctacataatgtattataacattgttgcatgaaatgatactcagaaagaatgtatcaraaatatagggaaaagttagtagagagctatgccaggcagtacatcaataaatattatgttattattctagattttgcaatgtttgtggtatatgtcatgttttaaaaatttataatttattagaatcattctcattctaaataaaaattcaagagcatgcttaatattgtattctttttcttaaagaagtctccaaaactgtatgagtttcaggcacaaatgtggatccatccctgaatttatgagagtgcctgtttccccacactcttgctaattctaggtagtgttaaaattttgtatacttgccaatctgataaatagtatatggtatatttttatggttttcatttatatttaattataaattaagctgagcattttattatcttatatagaaatccctttcattatctttgccagagttgtctttaaaaaaattcatctgtgacaattctgactgtaacacaattatctctctgtctgtcaatcatgcttcaaatccttttctcaattatttgttgattctttgactttgcttatggcgtaattttttttcccattaaaaaatattcaatttttattagatttaccaattgatgacaacactttgaaaagggtaaaagtgctatattgaatttattggggcttaagtatggattgactcaatcaaatacctttaaggttaaatgagataagcacagtttaagaaacataaaaacctagatattttggcttactttctccaagtcagagagatggtaaattataattttttttagaaaccaaggattctagatatttcttcctgtttcctttttttttttttttttaacaaggccaagttagtctatacttggaattggtgaggaaatctataggacccaatctataagacttgcattttccttgtcaagaagtgaccctgaagtacaaacctaagctacctatgctgctgcctccatgggaagggcctctgtttattctctctgggatgaaatgtccaaaagtcatttctccaggctcttagctcattatacattttgatgagtgaaccatgccaacctcatacagaagacaagagttccctacatagaaacacatttggttctttcagtagcctccccaggacaacagacctgctcacctgcctggcaagctacttctgtcctttaaggcccactttaaatgctgcttcattaagatgtttctggattccaaggaataaataatcacacccttactgaagtttccatagcagtagttttacagtatctttatagcacttaagatatgtataatataatatatagtctgcatctttctcctctattagaccatgggcttcttgcaggtaggagtgtgtctcattcatcttgaaatccacagaacccagcaaagggtttggcaataataggtactcaagacattttcatttttgtggaatgtacaaaaagtctataaacatgatttaaatggagtataaatagtatacttaaactaccaaaaaatctaattactattagtagtacatttataacaacacaagcatggtatgggttgctttggtcataaytgaaagttgggtattctgtttttttttttttttccttttcaatttttatttcaggttcacaaggtacattacatgtgcaggttggttacaagggtaaattgcatgttgctggggtttagtgtacaaataattttgtcactcaagtagtgaggacagtacctgataggtagtttttctaccctcaccctggcattctgttgagcagacaaaaataatacactgtaggccagatttttatttttaggtttcttaggtcctgcactctcacgactgaattcataaccatattcactttgaagagccaaggacattgtcacagcaatttgtagacactgtcttgcttcactataaatgggttaacacatttactcatacaatcacactttaagtgaaaactgctaacatctatagagagggatggttttggcactaaaaggccaatacacttactttaataaatgctcatctgtataattatacataataagtgttttggacaaagacttcaaagtcttttaagcatttatcataaacgatgtgaactagtacaagaaagaagacccctgggccccaccataccacaggcttaggcatcatcccatgtttattacatagtacagatctcagtagatcactgtgctttggaaaagtgtctaatttattctttcacrcttgccaaaatatagctgcattgggaaacttaaaatagcccagtatttaattggttctaggcatgcacataaacaggtattgttaaagaaaccaagttattgattcaataaaagacagcggataaccacaggccccaccacaacttatcctcatggaggtcaaggacagcaaacatttatttggggtctttaatgacatctagtcaatttctctaatccatagtcttttggattagtcatttatcattcctttgggaaaacaaatcccaaaatgactggttcaaatgcatttgaccttgagctgcaaaacagataattcatttacatgaaatagattactctgtaagaagattctgttaattgagactgttttttgaaagtcataagcctagcaaagtttccatagcaactctgacaattccacatagagttagttatgttaaccttgttcttgatctattattatctttaatatactatgggtgtaaaatagctactgaatttgttacaggatcaaacactacaaggatatcactgacacaacctgtaaggcattactggcagacttcaggagcctaataactgtcagttattgaatgtgtagttgacaccatctgtatataatatctttgagatgacttactgaatgctcatttgtaatatatcccaattgggcaccagagaggttagatcatttgacccaatatcacatgaacaagaattcaagtcctctttggtctgactacaaatgatgctctttcactataccggtttcattaagctstatacaaggttctgaaaagacattcattctctgtgttacaaacatttgatttgttaagtattagtgggatactacctcccctcacgcgtctgttttttttaaggctacttcataaacatcatcctgctgtctctgtctaggaactaaactgtcaggaatgatggtatcaccttgcgactaaggtaaagcttattctaagctttcacatgccttgcttgtatccacgtctatttattcagcctttgactaataactgatcatcaaattccatcttagtcaaagtccttttcacttctacttacactatcgttaaccatctccttaccttccctctctatttcattttgatttttttcctcttttaaaaagtttgtccagttctttaaaaataaacaagccactcctttatatataacctctacttcttatttgttatttcaagaattttcctaatggtgactgacaaatacaagagttaataatgctacaccgaaaaccaagaggccattaacatccaaggctgtgaaactacccagatggtcctttttctataagcctccaataaactcatctagctaaacatctttccatagcagagcactttggaaaaacaatacaaaatcactttatgtctttaaaaatttttaatcattagaattgcaatggtattttttctattttttcattttaaacacagatgtacatagaacacccaacataaccaagttgttgggacttacatgggatttttggtgggcctgctttgtaacactaagtgttccaaattggttctaaacatctgaccgtcaagtacactgtaattcactacgttttaaaattggggacttcctgtatttgttggagtggagatgtatatttgcattttgattatctgtggatgaccaatttgactggaatcctcttgctttttggcatcttcctccagtttctgggctagatgataacttgccaagacaggtgggtgggaaagcctgaggttgcacgtagaagagagcatgtgcttttggtctgaatttcaaagctgaacttttgattggactcgtcttcctttttttcytttttcttttttttttgcctggtgactggtagtgtctttactaaacaaagtacttttcttggctaacaagatatatgctgagcagaaaaggtagagctgagaggtctctcttcctccccttaatcagaacagatccagcagagagaagctggagcccatgatattygaaagaatccaagaaactttagctgtgttggaaaaaagcttagtaggagagatgagagtttagaagaatggagagggaaaatctgatgaaagagatgaaattaaccataaacatttaaaagaatatcatcatgatttttaacaatccagcagagcctataaaataaaatttatatagaagattattagggaaccagtaatttcactgtgtgttatactttatgaagtctcttatagtaatttttgcatagttgactttttttttttwaaaggaagaggcaaatgacattgcattttattccactataaatctcaggagcaaagccttaattcatgtgactatttgggatggttctagacacgtaggtctcttcaaaattttaaagctcagatctgtcaggacaatgacctagattcctcttcaagtttggtcctgtagggcttgttgccccacacagtataatagcagtagtctttctaccttggcttctagacagacaagcaggctaagttagaaaagatacacattgtagatgaagatgagctttttttttttaatatttcaaatgactacatctataggagagatatgatatgtaaggcataaccataacagaagaagagttagggtcaagtcaaataagatctaacttgatcttttgctgcaacttggtgatctccatgcagtggagttcctgaattttaggaacagatcattttattctattttgcatgcatcttctaacaattgtattttgaggcacattttagcatgacttaactagtttttgaggtctcaaagtaaaaacactccaaggtactttaggttctaagtaaagtttctcatctttttatgacaatactgttgtttttctcctgttaactgagttctcatagacatgttctatgatatagttgggactcttcctcatgaccccttcaagctcataaaaatccataataggctgggcgtggtggctcacacctggaatcccagcactttgggaggctgaggcaggcggatcatgaggtctggag

SEQ ID NO: 1612 - DNA, 13445 bp, Homo sapiens
ctgcactccagcctgggtgacagagcgagactccgtctcaagaataaataaataaataaataaataaataaataaataaataaataaaataaactgtcccgtttgttctatttccccagcaagaggaaaacttgggcaacttgatccatgagaccgaatccttcttcaagacgagagacaaggagtaccaggaaacgataggtcagatcgaggtgagggctcgggacgtggagcccactcgtgaggctctcctgaggtccacatggttgagatcctggygatcaaacacccatgtgtcatgggcaggggctggtagagtggggcaggcgcaggatcgggagtcaggaggcctcggggcgagtaatgtctttcttagggcctcagtttcctaatctgtcaaatgggggtggtgatccttgcctgcctcagagaattagaaagaatatatgtagctgagatgatcccataataaccacagagctgacattcgagtgatagtgagtgacacaaggtgctgagtatgcccggtatccttacctgtgccctatgcagtaggcaccgtgcaccccttttacagaggaggagatgaggctggaaaggaccaagtgacttgcccaaggccttgcggccaggaagcagcattgaagtataattctctctggctccagaggctgtgcatgtgatcacttctataaacgatagtyattgctattatgcaggagaaagggaagcccagctccttccctagaggaagtatcacttgatagaggacaagagtcagaaacatgaaaaagccttcaggatttttrtaatcrggtctggataaaggaacccaaagatgttgagttctcagaaccgggtggggtgcatcagagccaggctgctgctggggttgctaagcaaccattcccctttggccagaaggagttctaggggaagtggacccatgtgcagagagcagagggtgagggaggttgatgtcyggaggcagggtcctgatggcatggtgtccaatggtggccttgatggcaccatccctgaggaatccaggaggagaggttgccgaggcttctgycacgaggatgacttgccctcacccttattcctcattggttcctcccagctcgagctggccacagccaaaagtgacatgaaccgacacctgcacgagtacatggagatgtgcagcatgaagcgaggcctggacgtgcagatggagacctgccgccggctcatcaaaggctcygcagacaggtacccrcccatcctcccaggggattcagctatggcatccttggaggggaattcccaaggctgcaactcggccatgtgtcatgctcccaacctgtctctctgtccgtccatctgtccgtccgtccgtccatccatccatccatccatccatccagtgactattagcacacctatgtgccagatgccttacatatctaacctcatgcaagtcccaccaccaccctgccctttgttgattcaatagatacttgscaaaggcctgctctgtgcaagacggtggggccagtaagtatagcccctgccctcaaggagcttaagccccattttctgctgaaatggggagcagaggtggacagggcatgctcccatttgctcacaggaagtgatttcccttcctttcccatctgttagtctgttctcatggtgctataaagaattgcctgaggctgggcgtggtggctcacacctgtaatcccagcactttgggaggctgaggtgggaggattgcttgagcccaggagttcacagctagcttgggcaacatagcaagaccccgtctcaaaaaaaaagaaatgcctgagactgggtaatttataaaggaaagaggtttcgttgactcaccgttccacatggctgaggaggcctcaggaaacttatagtcatggcagaaggcacctcttcacagggcggcaggggagagaatgagtgcctagcaaaggggaaacccccccttataaaaccatcagatctcgtgagaactaactccctatcacaagaacaggatgggggaaaccgcccccacgattcaattatctctaactggtccctctcatgacacgtggggattatgggagctacaattccagatgcaatttgggtgggaacacagccaaaccatagcatcctcttccaacccagggcctgtccccaggagactgacaagtgtcaggcatggcacataaagcagagcccctgccttcaaagacacacagccttatcgggggacagccacgctgagaatgagctaatatgaggagaatgcctgccacacagcacaaatacgttgtcactgttttcctcgttttgctgcattactgtacgagagggagggacagctctgtgggggccagatctgtgtgcagggccgtagccttgcctttcagacctttaactcctcaaacccccagaacccagtgtggttatctccattatccagacagaagagcagaygctcaggcaggttaaacggtttgcccaagttcccccacccccagctcatccgagatagaatcagaactgcaccccagtgatgttaaccrtatcccgcatggcctccttttgagctctgagtcattcaggttttacttagcacctactatatgcccagacatgggttaggtgcttggagagtaacagccaaacttgatccacggtccagctcccaaggggctttcttcctagagaagccaacacagccagaccaagtaggggctggtgcagggggttacctcgtgagcttaaaggatcttaaggatagctgagtgaggcaggagctcaggaccaggcccctctgagagtagatcttatagaagtggcagctcagccttcccactccttgacccttcagaggcccagggctgctctctgaatttccccactctcttgtgcttctcaggaattcaccgtcccccagctccrtggccagcagcgactcaggaagtacagatgagatccaggatgagttcgagcgcgaggcggatgtggagcccatggtcagctgatgactgaggccctgcgagcctggtggtcttggtgatggggccctgccacctctcctcatggggccaggaaggcccctcggagtggggttcgaagccacaccacacagactttctctgccctcccttctctggaggcccygagggactgctgcttccttccttccttccacaccaccaacgggtgccccgtctccatcccccacccacccaaggaatggtgctgtcaatttctattgttctccacattacaaatgcagacttctgtgcggactttgcagtgttaactgtgccttctcccttaagctgagccactttgagctccaaagaattattcctagcaggtgtttttatacagaactctaagctgagggccgggccaaccggccgtggtgtaatgtggtttctgccgtccgtcccacctgctcctctgattggccatgggctatgccctcccttcctcctgagccagcccagactcggcctggagcttggggtgctctgccaacccccaggaaggagccgcttgcctctgtgagctttctaggcctgggtagggaccaccccaattttctcactccctgaaggagagaaaggtggaaggaagggaaggaggacacattttaattttttggggggatcgagtggcaaagttgaagggacaaggcactgtgaggggaaggcagagsctcactgtgtttaaactactatgcaaaaaacaaaacaaacaacaaaagcagcttgccttatatcattgtggaaggcaggacctctcctgggctcctggcttccccctggagctgggagagaggccggggttagggtgatctgtgtggcagcactgactgggtagtgtgggtttggccgaggttggtcatgaggcyggggttcccgcaaggcactggcctccctgaccgcttgctyccttccggacctctgggttcagggcgggggyggagggatccttgatttccctgataacttgatgttcttccctccctcgccagccaacaatagaggcttagagatctgtaatttctctgtgagaaagtctgaaggggccaggcctggtctctgctcccttctacccgccttgggttaggactgtccggcagttgcctgcttttggctgctggcaggagagaagcagggtgggctgctggcagtgcaggagctggagtgagggccatcctctttctgctcctcgacacacgcaagccgctctcagcagttccctcgactggccagtcggggtattgatctgagccagcatcccccaagacttgaatggcttgagtgggactgcrttgaagggcactgtgtggcccccttccaaatctcagcttggagccagctgagcaggctttgctttattattattttttaagcctactgcagtgggtctgttgccaattttaattttttattgtcccaggagctccctctagtggtcaaggtagcaaaatgtgcccaaggactagaacttgggtccctctgccttgcctggaggcagaaggagggggctctgggtttgactgggattgtggtccccaggggtccgtggcctttaaggctcttctctcttttctgtttccsccacctgtgttacagtcttaaaaatactgtacataaaagatatatgtagagagagagagagagcgtgagaatgtgttagtgactatgtgtgatgtaatttatcacgatttggtggccttcgtcatgagttttttcctttgttttcttttgctgggggcacctcccacgggtcccctgtggcagtctggctgtgacacttccatagtcagcatctcttgttagccaaacagttccctttgacaggtacttggagggacaatggttttggaagagagacggcccttctctctcctcactcacccttgttctaaaggttacagggttcaaacatacctgattcttgttgttattgttgttgaatttttattttaaccaaaggttatcagagccagttgggcttggacctcagctgctaaaaagattttccgtttcctcgagggcaggaaaacatccaccctcgtgggtctcctccgtccagggccgagggaggcattggayaatgtggtatgggagtttcgtgggcagcgtggaagccggccctgggttgttccccaaggtggtgggagggtgacagatatatctttagacttaagactgtaaggcagcagtgttagcatgggagtaactaaggttactgtggttatcggtgtccggcggtattatttttactttcctccttgtatacataggtcatttgtctttgaggactagggtactctagggagtttgaaaactgcaggagccagaaagagatcctggcctgagagtcccytcyggctggcttttaatatctgctctcctcttgggagtgaggacttggggcaggtgggtaggagagggaaagccagagtgtgatgggcctgcctcctgggctggttcctgggtccggcctgcctgcctgcctgcctgcctctccaccacatgcttttttcagttaatgtcagtgggccctgcttgtcccctcaccatgagcccacagcttgccaagaaagaccccaacgctcgctggggcagcaccagtcctagctgggacgaattggtccatcctytgtaaagctgtaaatrcttaattttgactttctatttctaagcccagtgtcatattgacactggtattttagaattttctcagatgggctctcctgcgctgccctctgtctcctgtttttgggggttttatacaaacagaggattggggagggataggaagactagcatccttttggctccctggttggttgtgaaatacacacacacacacacacacacacacacacactcgcactcctctgagactccgaacagagaaaaaaattattggcaaatcaacacatttttctttctcgtcttgagaaaatgtcttgaggtccctgaagggccaaatccatcgtggactaactctgtgggtagagctcagatgacctagggagaattaaaccacttamgcttggagtgggaggagagggggtggggtgggggagaatataagatgtaacttaagctaaatgtaatctatttataaagcaagagactctcatctatttttatgaaaggaagggttttttaatctagggtaggcagttgtggtagcccagcattttcctgtggacgagacatggtgcatgttgttgctggattgaatggaacccattcctgtccccyggcctcgtcttctgtcctcacttttggtcatccacacccatgagcagcttcagcagagtgtaggtcccacttcaccccattctcctctcctctgacccctcagctccttggaagtcttggggtggggatctgagggggtgggtgggctgcaggaaattcagaaatgtggtgggtgggggaagggacaaggcgcattagggagggaacaagctgggctctggggataggctctgattaattagttactctgactctggtctgccgagatccatttccaacccagttgcgttgggagagggttgggaggcagcagagcatgggtracagtgggagcacacgacttccttggagcctgggcctttgcgggtcccaggtggtcaggcagctggagcaraagtggaaatggcttaagatgctcatagcccagccccggctgtgtctactccaggccaagcctgggctgcagtccttgctatgttccccccagggccctgrggggagggatcagggtgctgggggtttcctaggacaggggtcttcccccttgagacaccaagctctggctctagaagagctctctcctggagtggggagtctggaggggactgggtgggtgcaggtaaagccagattctctctggaagggaattttctakgaatggatgatttccaggctcagggtgggctgtgtgttagttctgagcaaatccctcaccaagacccttccctcccaagccctcaaagaaatgaggcaaagcccttccctgcaagaccccttgtggaygtttttgcatctacctgatttttagccccacccagggagactttataccccatgatcctgccccaccgttgctgttgtctgccagctgggtctagcatcacagggaagggggggatttatactcayggaaagactactgatcctaccggaaaccaacctgtttactgtactgttgtaaatatcatgccctttatatcctgtatattggcttcttttaaataaagtgaaatgtcttagaactgatggtgcttttttttgtttttgtttttaaacagaagatgaatctggtgttgggggaggggtaggaggacggaaggccacagaaaccctcaaactcattagttaattagccataaaataggggatttcatatcacctgttacatttgtagctcacaataaaagctttggaagatgacaaagcaggaatcattacacacattttactgaaggggaagagaggacatgagacatcacaggctcagtaactggcttggcctggtttggaactgatgtccttttaaccacaaagcccccatttttccaggctctccaacgtgcccacaggaggtcaccttcccaggctctggatttgacagtaaccaatgttctagtttttcttgtcaatgggcatgttcagggcaacattgcccaaatgtgaactgagcccacctgtctagggttttctccaaaggtgaagacaaatagccgccaccaattccaatttgctttttgccattcctaatacttggcayttaggtaatctccctctcctactcttcatttaaatgtttacattctcccaaagtacctcaaatggtgtaatctggagaaaaataagtggcttaagatcacgggggctttgtgagttgggtactattacttccgttttacagatgaggaaactgaggcccggaaaggatatgtagtctgcctagtgccctgcttgaggaaccaaaatcagcatgggaactgactcctaagcaggtgcgcggttcatgctgctggaagaaatataaacaaattagaacagagagtaaggaaacgtaacattactttaggaatagattgggtccctgagacctcgtcatcagagaagacttcagaatccaagttttaaatagcattctagtgtttaccaagcacacaacattttgcaaagaaagctraawtttttacttgggggtaaaaggctcaggaacaactggttttgcggccaaaggctttaaatgaaaagctaagcgttggccagctcaggttttatcttgcattgatcgtaatctgcaaggaagctaagaagctggccggccccgcgcctggagggtaggtggagagcggctgggtcctggccaagaagctggaaggcaggctcattccaggggccgcagcccccgggaagaagcagggggctggccgcgctgtggccctgcggggtcgaggagtctggtagcggacaggtttccagccttgtacaagccaccggcagcccgagagaagtcagtcggactcccaycgaacccggggcscacgccagagggccggrcgcagcgagtccttctgccccgcttcagcacgtgtcccatttcggttatctcattggctctattcagcccctctctgctccgctttggaaggctgccgcaggaccgccccgctgattggttcagaagctttggtgtgtcactctgactggtcgacagagttcacgccctctctcccgggtcataccataaagagaggaggggaaaacgcatgcatttcaggacttcgctttcgggttcccttgtcctgtgttgtgtaatgcccccgttatggcactagaaatattttttattagccgaagctaaatatagtgggactttggctgatcccgagctcggaggacagccggggtgatccgtttccccccgaggatcgaggtggtgcgctctggacggggttgtgcattctcgccgcgcccgggcggacgatccagcgaacagccccgcttctarccmgagatgctgctgccggcgcccgcgctccgccgcgccctgctgtcccgcccctggaccggggccgggtgagtgagcacggggcccggggcggcccgagcgcgcgcctggggcccgggagcctgagagtcactgggcgtcccccgcgccgcactccctccctgccggacccccaagctgcctcggtcaacgccgggttcctcaggggctcccctccgwcccccacccaggcctttctcccactgagatcccttagcctcctccctcaggtagtcaccttcctttagcgaggggacccctcttcccgaatcctgcgaccgagtagggtgcctcggtggccctgccggttcccacgctcggaaagtagcctctgtagtcactcacctcactcctaatactggatcttcgcaatttgctggcttcccctgaggggcccttctatttttagcacaccacacatctcacttccccaccctcgtctcacgttcagtgtccccatcccgccccggattccccgagtcctctccttctaccaggatttctacctctctcttttccgctccccacacaccccgccgcccgtttttttttttttttttcaagttaaatgttggacagaaaaaaggattcctttcttcttgtaggtggaataatcatatttatagagtgcttataatgaaccaaatgctggccgggcaattggcaggtgtcttatgaggattaaatgagttaatacatggggagtgcactgaacagtgcccagcacaaaggcagcgcccggttattattattgccacgatcatcatcattatcacctctatttaaacttctcactcctgtgaggcaggtcattattccaaataatgaagaaacccaggagcagttcaggggtggacctgcccttcaaatcccgatttgcaaacctgacattgtggagccaggtgcctggacccttgcccactcaatgacaaatattctcagagcccctccagctcggagctaggtttggagaggtaggtgggacacagaccctgccccagaggggttcctagtctggtggggctgcccacctgtggatcagccccccctcccattkgargtttgtttgcttgacccctggggctgttagtggcagkgtctttcctgatgagctgtgccctttctgagttaatcagtggccctctcccttcccccaagggatggcatggtggtgctctgagcacawgtgagttkcaacactgctgtgtgtcctctgtgggtgragaggggataggaaagggcgcaggaagaggacatgggacagaggggttcctcttctaggctgagactggggccacacttgccatactcyckgtgtgatcccgtttgcaggccttccctgcactctgagactcaggaagatggagcttatagagtcctgtgtttactgagtgcctactgtgagctggtgctctgccaaacaccctagagatgaggrgtacccagggaatttacatggggtggggcctttgaggagttttcggcttaataggggagaaatgcataggaaaaccctccaatatctagtagaaagcaatccatattctaaaagataagcccatgataacaataatgattatcaagcaatcaagcaccatgggcctaacaccgagccggtaagtactgtctcattcctgtattatcatgggaaacgatctgccatcagagatatatgactgaaattacatttggtctaaatccagatttatgctctgaattatgaggcctcctgaattgagaggggaaagagaaagagcattttgcagctggttccctgggctcaagttacccctttgatacagcagctggccgcatgccctagacaggatttctcaacctcaccactattcgcatttggggctacattttggttgctgtggagtctgtcctgtgcactgtagaatgtttagcagcgtctctggcctttacccgctgcatgtcaggggcacccccggccctgacaattacgaaaaaaaccctggccctgacaggaaacacaagttcccagacattgtcagatgttacctgggggacaaaagtcacctccggttgagagccagtgctctagaggaacagctttgatgtttgatcacttgttcatttactcagtgaacatttagagcacacccgtgacatgccatgtctgcatttatggagaaacagtcgcagggcattttcagtgacatccctcagtgtcctacgtgtaaaactctagtcctgagaaaaaccgctgcttttgaggaacgggtataggagatgcttcttagtgttttcttttttgccttgagtgccaggaatctctgctagttttaaaaaatacccttgatacatgttttcttttagtttaatacatgtcaactgtgaaaagtacagataaggcaaaaaaatagaaaaatcacctggaattgtaccacacagaggtacccactgttaacattttgattcatgtcctttaactttccatgaatagatatgcttttaaaaaaaacctcatagaaacaagctcatctgcccatactttattgtagcttgttttttccctttatacacttgtctgccttacagtatgttcccaggccctggaactgtgtctggcacctggtaagcccttggcaaacatttagggaatgaatgaactaatcatgtgagcccttccttgtcaatcgatatttatcacggccagcctcaggacaatcaccataaagtgtggcctttataggtgggcccagggatggcagctggtgacaatgactgccatttacttttcatgtggattattttactcagcctctcagcaacctatgatgtaggggttaccacccccatttcacagattaaacaactgaggcccatggaaattaaggaaaacttgtccgaggccttgagctggtgaacaccaggcctcccaactgactgtctctttcctcctttaaccctgacttcctgtttttttctcaatcaactttaccatcagtatcctcagttctctttggaaacaggcaggatacagattaatagccagcccaggcatgtagtaggcttataagagttcacttctgttccttatttcttgtgccaagcccagacatgactccagctcagcccgtctgacatcagggggcttgtgggccggaattggttactaccgtgtcccctgcagtgatcctgggtggttttggactcttctcaggctacctgatggtttaattttcaaaatatcaaaagcacacaatgcttttccyagtctgcccagcccttggatgggcacagcttgccctgggtcgagggctggcatttcccaccattccttagacattctctgctcttgaactcctccaaccagtggctggggcagtgcctttggcctggaatgtcctgctggccacctcrgtgagcccatccagtgctttgtggccttggcaaggcagcttctgtcccttcagtatcctcgtctgcaaaatggggatgattgtattaacagccacgtagcaggtggctgcaaggattagcggtgatgtgatcagtggtttcctggatgctggtaccgaatgcgtgctctgtgagtatttgagttggagaataattaaaacctgtgattatcatcacacttctaaagtagtgaaagcgccattgaggcagtgcttggcagtggcacccctgggagcagcctgcctcctgtgccctgcatctggcccggcacacagtaggcgttgaacggttgctgttgagatggtccagaacacagcatggcttggatcctggctccaactcttggcagctctgtggccccgggcaggttactcaccctctctgggctcccttatgttctcatatggaaaataaagatgacagtagtagtcacctcataggattgtcctgcgtgttaaatggtctcatacatggaaagcactttggagtgcccagcacctgaaatgctcagtaagtgctgctgtggttatgatgatccccctctcccaccaatgggcttcctggagtgatcatcttcgatcaggaatatcaagacagcagggcccagcagtgaaggatggtggcaggaggggaggtatggaactcagatgtcctcggtctcttctgtttattccaattaagtaccccagatgccaaacctcttctgttattattgttggtttgtttgtttgtttgttttggagacagagtctcactctgttgtccaggctggagtacagtgtcatgatctcagctcactacagcctcaacctcctgggctcagtcatcctcccacctcagcctcccaagtagctggaactacaggcgcacatcaccatacccagctaatttttgtattttttttttttcgt

(The sequence listing continues in the following parts.)
